(19) United States
(12) Patent Application Publication
(10) Pub. No.: US 2025/0282891 A1
(43) Pub. Date: Sep. 11, 2025

(54) Anti-PSMA Antibodies, Bispecific Antigen-Binding Molecules that Bind PSMA and CD3, and Uses Thereof

(71) Applicant: Regeneron Pharmaceuticals, Inc., Tarrytown, NY (US)

(72) Inventors: Jessica R. Kirshner, New York, NY (US); Alison Crawford, Dobbs Ferry, NY (US); Gavin Thurston, Briarcliff Manor, NY (US); Eric Smith, New York, NY (US); Lauric Haber, Rye Brook, NY (US); Drew Dudgeon, Union, NJ (US); Ashique Rafique, Yonkers, NY (US)

(21) Appl. No.: 19/217,751

(22) Filed: May 23, 2025

Related U.S. Application Data
(63) Continuation of application No. 17/476,856, filed on Sep. 16, 2021, now Pat. No. 12,344,677.
Application No. 17/476,856 is a division of application No. 16/205,917, filed on Nov. 30, 2018, now Pat. No. 11,155,633.
Application No. 16/205,917 is a division of application No. 15/223,434, filed on Jul. 29, 2016, now Pat. No. 10,179,819.
(60) Provisional application No. 62/199,823, filed on Jul. 31, 2015.
(60) Provisional application No. 62/222,590, filed on Sep. 23, 2015.
(60) Provisional application No. 62/351,823, filed on Jun. 17, 2016.

(51) Int. Cl. C07K 16/30; A61K 39/00; A61K 39/395; A61P 35/00; C07K 16/28

(52) U.S. Cl. CPC C07K 16/3069; A61P 35/00; C07K 16/2809; A61K 39/39558; A61K 2039/505; C07K 2317/24; C07K 2317/31; C07K 2317/33; C07K 2317/56; C07K 2317/565; C07K 2317/73; C07K 2317/732; C07K 2317/734; C07K 2317/76; C07K 2317/92; C07K 2317/94

(57) ABSTRACT

The present invention provides antibodies that bind to prostate-specific membrane antigen (PSMA), bispecific antibodies that bind to PSMA and CD3, and methods of using the same. According to certain embodiments, the antibodies of the invention bind human PSMA with high affinity and bind CD3 to induce human T cell proliferation. The invention includes antibodies that bind PSMA and CD3 and induce T cell-mediated killing of PSMA-expressing tumor cells. According to certain embodiments, the present invention provides bispecific antigen-binding molecules comprising a first antigen-binding domain that specifically binds human CD3, and a second antigen-binding molecule that specifically binds human PSMA. In certain embodiments, the bispecific antigen-binding molecules of the present invention are capable of inhibiting the growth of prostate tumors expressing PSMA. The antibodies and bispecific antigen-binding molecules of the invention are useful for the treatment of diseases and disorders in which an upregulated or induced targeted immune response is desired and/or therapeutically beneficial. For example, the antibodies of the invention are useful for the treatment of various cancers.

### CROSS-REFERENCE TO RELATED APPLICATIONS

[0001] This application is a continuation of U.S. application Ser. No. 17/476,856, filed Sep. 16, 2021, which is a division of U.S. application Ser. No. 16/205,917, filed Nov. 30, 2018, now U.S. Pat. No. 11,155,633, which is a division of U.S. application Ser. No. 15/223,434, filed Jul. 29, 2016, now U.S. Pat. No. 10,179,819, which claims the benefit under 35 USC § 119(e) of U.S. Provisional Application Nos. 61/199,823, filed Jul. 31, 2015, 62/222,590, filed Sep. 23, 2015, and 62/351,823, filed Jun. 17, 2016, each of which is herein incorporated by reference.

### REFERENCE TO A SEQUENCE LISTING

[0002] This application incorporates by reference a computer readable Sequence Listing in ST.26 XML format, titled 10173US04_Sequence, created on May 23, 2025 and containing 2,054,953 bytes.

### FIELD OF THE INVENTION

[0003] The present invention relates to antibodies, and antigen-binding fragments thereof, which are specific for prostate-specific membrane antigen (PSMA), and methods of use thereof. The present invention also relates to bispecific antigen-binding molecules that bind PSMA and CD3, and methods of use thereof.

### BACKGROUND

[0004] Prostate-specific membrane antigen (PSMA), also known as folate hydrolase 1 (FOLH1), is an integral, non-shed membrane glycoprotein that is highly expressed in prostate epithelial cells and is a cell-surface marker for prostate cancer. Its expression is maintained in castrate-resistant prostate cancer, a condition with poor outcome and limited treatment options. Methods for treating prostate cancer by targeting PSMA have been investigated. For example, Yttrium-90 capromab is a radiotherapeutic comprising a monoclonal antibody to an intracellular epitope of PSMA. In another example, J591, a monoclonal antibody to an extracellular epitope of PSMA, is part of the radiotherapeutic Lutetium-177 J591 and in MLN2704, in which maytansinoid 1 (DM1, an antimicrotubule agent) is conjugated to J591. These therapies have been associated with toxicity. PSMA is also expressed within the neovasculature of other tumors such as bladder, renal, gastric, and colorectal carcinomas.

[0005] CD3 is a homodimeric or heterodimeric antigen expressed on T cells in association with the T cell receptor complex (TCR) and is required for T cell activation. Functional CD3 is formed from the dimeric association of two of four different chains: epsilon, zeta, delta and gamma. The CD3 dimeric arrangements include gamma/epsilon, delta/epsilon and zeta/zeta. Antibodies against CD3 have been shown to cluster CD3 on T cells, thereby causing T cell activation in a manner similar to the engagement of the TCR by peptide-loaded MHC molecules. Thus, anti-CD3 antibodies have been proposed for therapeutic purposes involving the activation of T cells. In addition, bispecific antibodies that are capable of binding CD3 and a target antigen have been proposed for therapeutic uses involving targeting T cell immune responses to tissues and cells expressing the target antigen.

[0006] Antigen-binding molecules that target PSMA, as well as bispecific antigen-binding molecules that bind both PSMA and CD3 would be useful in therapeutic settings in which specific targeting and T cell-mediated killing of cells that express PSMA is desired.

### BRIEF SUMMARY OF THE INVENTION

[0007] In a first aspect, the present invention provides antibodies and antigen-binding fragments thereof that bind to human PSMA. The antibodies according to this aspect of the invention are useful, inter alia, for targeting cells expressing PSMA. The present invention also provides bispecific antibodies and antigen-binding fragments thereof that bind human PSMA and human CD3. The bispecific antibodies according to this aspect of the invention are useful, inter alia, for targeting T cells expressing CD3, and for stimulating T cell activation, e.g., under circumstances where T cell-mediated killing of cells expressing PSMA is beneficial or desirable. For example, the bispecific antibodies can direct CD3-mediated T cell activation to specific PSMA-expressing cells, such as prostate tumor cells.

[0008] Exemplary anti-PSMA antibodies of the present invention are listed in Tables 1 and 2 herein. Table 1 sets forth the amino acid sequence identifiers of the heavy chain variable regions (HCVRs) and light chain variable regions (LCVRs), as well as heavy chain complementarity determining regions (HCDR1, HCDR2 and HCDR3), and light chain complementarity determining regions (LCDR1, LCDR2 and LCDR3) of the exemplary anti-PSMA antibodies. Table 2 sets forth the sequence identifiers of the nucleic acid molecules encoding the HCVRs, LCVRs, HCDR1, HCDR2 HCDR3, LCDR1, LCDR2 and LCDR3 of the exemplary anti-PSMA antibodies.

[0009] The present invention provides antibodies, or antigen-binding fragments thereof, comprising an HCVR comprising an amino acid sequence selected from any of the HCVR amino acid sequences listed in Table 1, or a substantially similar sequence thereof having at least 90%, at least 95%, at least 98% or at least 99% sequence identity thereto.

[0010] The present invention also provides antibodies, or antigen-binding fragments thereof, comprising an LCVR comprising an amino acid sequence selected from any of the LCVR amino acid sequences listed in Table 1, or a substantially similar sequence thereof having at least 90%, at least 95%, at least 98% or at least 99% sequence identity thereto.

[0011] The present invention also provides antibodies, or antigen-binding fragments thereof, comprising an HCVR and an LCVR amino acid sequence pair (HCVR/LCVR) comprising any of the HCVR amino acid sequences listed in Table 1 paired with any of the LCVR amino acid sequences listed in Table 1. According to certain embodiments, the present invention provides antibodies, or antigen-binding fragments thereof, comprising an HCVR/LCVR amino acid sequence pair contained within any of the exemplary anti-PSMA antibodies listed in Table 1. In certain embodiments, the HCVR/LCVR amino acid sequence pair is selected from the group consisting of SEQ ID NOs: 66/1642 (e.g., H1H11810P2); and 122/130 (e.g., H1H3465P).

[0012] The present invention also provides antibodies, or antigen-binding fragments thereof, comprising a heavy chain CDR1 (HCDR1) comprising an amino acid sequence selected from any of the HCDR1 amino acid sequences listed in Table 1 or a substantially similar sequence thereof having at least 90%, at least 95%, at least 98% or at least 99% sequence identity.

[0013] The present invention also provides antibodies, or antigen-binding fragments thereof, comprising a heavy chain CDR2 (HCDR2) comprising an amino acid sequence selected from any of the HCDR2 amino acid sequences listed in Table 1 or a substantially similar sequence thereof having at least 90%, at least 95%, at least 98% or at least 99% sequence identity.

[0014] The present invention also provides antibodies, or antigen-binding fragments thereof, comprising a heavy chain CDR3 (HCDR3) comprising an amino acid sequence selected from any of the HCDR3 amino acid sequences listed in Table 1 or a substantially similar sequence thereof having at least 90%, at least 95%, at least 98% or at least 99% sequence identity.

[0015] The present invention also provides antibodies, or antigen-binding fragments thereof, comprising a light chain CDR1 (LCDR1) comprising an amino acid sequence selected from any of the LCDR1 amino acid sequences listed in Table 1 or a substantially similar sequence thereof having at least 90%, at least 95%, at least 98% or at least 99% sequence identity.

[0016] The present invention also provides antibodies, or antigen-binding fragments thereof, comprising a light chain CDR2 (LCDR2) comprising an amino acid sequence selected from any of the LCDR2 amino acid sequences listed in Table 1 or a substantially similar sequence thereof having at least 90%, at least 95%, at least 98% or at least 99% sequence identity.

[0017] The present invention also provides antibodies, or antigen-binding fragments thereof, comprising a light chain CDR3 (LCDR3) comprising an amino acid sequence selected from any of the LCDR3 amino acid sequences listed in Table 1 or a substantially similar sequence thereof having at least 90%, at least 95%, at least 98% or at least 99% sequence identity.

[0018] The present invention also provides antibodies, or antigen-binding fragments thereof, comprising an HCDR3 and an LCDR3 amino acid sequence pair (HCDR3/LCDR3) comprising any of the HCDR3 amino acid sequences listed in Table 1 paired with any of the LCDR3 amino acid sequences listed in Table 1. According to certain embodiments, the present invention provides antibodies, or antigen-binding fragments thereof, comprising an HCDR3/LCDR3 amino acid sequence pair contained within any of the exemplary anti-PSMA antibodies listed in Table 1. In certain embodiments, the HCDR3/LCDR3 amino acid sequence pair is selected from the group consisting of SEQ ID NOs: 72/1648 (e.g., H1H11810P2) and 128/136 (e.g., H1H3465P).

[0019] The present invention also provides antibodies, or antigen-binding fragments thereof, comprising a set of six CDRs (i.e., HCDR1-HCDR2-HCDR3-LCDR1-LCDR2-LCDR3) contained within any of the exemplary anti-PSMA antibodies listed in Table 1. In certain embodiments, the HCDR1-HCDR2-HCDR3-LCDR1-LCDR2-LCDR3 amino acid sequences set is selected from the group consisting of SEQ ID NOs: 68-70-72-1644-1646-1648 (e.g., H1H11810P2); and 124-126-128-132-134-136 (e.g., H1H3465P).

[0020] In a related embodiment, the present invention provides antibodies, or antigen-binding fragments thereof, comprising a set of six CDRs (i.e., HCDR1-HCDR2-HCDR3-LCDR1-LCDR2-LCDR3) contained within an HCVR/LCVR amino acid sequence pair as defined by any of the exemplary anti-PSMA antibodies listed in Table 1. For example, the present invention includes antibodies, or antigen-binding fragments thereof, comprising the HCDR1-HCDR2-HCDR3-LCDR1-LCDR2-LCDR3 amino acid sequences set contained within an HCVR/LCVR amino acid sequence pair selected from the group consisting of SEQ ID NOs: 66/146 (e.g., H1H11810P2); and 122/130 (e.g., H1H3465P). Methods and techniques for identifying CDRs within HCVR and LCVR amino acid sequences are well known in the art and can be used to identify CDRs within the specified HCVR and/or LCVR amino acid sequences disclosed herein. Exemplary conventions that can be used to identify the boundaries of CDRs include, e.g., the Kabat definition, the Chothia definition, and the AbM definition. In general terms, the Kabat definition is based on sequence variability, the Chothia definition is based on the location of the structural loop regions, and the AbM definition is a compromise between the Kabat and Chothia approaches. See, e.g., Kabat, “Sequences of Proteins of Immunological Interest,” National Institutes of Health, Bethesda, Md. (1991); Al-Lazikani et al., J. Mol. Biol. 273:927-948 (1997); and Martin et al., Proc. Natl. Acad. Sci. USA 86:9268-9272 (1989). Public databases are also available for identifying CDR sequences within an antibody.

[0021] The present invention also provides nucleic acid molecules encoding anti-PSMA antibodies or portions thereof. For example, the present invention provides nucleic acid molecules encoding any of the HCVR amino acid sequences listed in Table 1; in certain embodiments the nucleic acid molecule comprises a polynucleotide sequence selected from any of the HCVR nucleic acid sequences listed in Table 2, or a substantially similar sequence thereof having at least 90%, at least 95%, at least 98% or at least 99% sequence identity thereto.

[0022] The present invention also provides nucleic acid molecules encoding any of the LCVR amino acid sequences listed in Table 1; in certain embodiments the nucleic acid molecule comprises a polynucleotide sequence selected from any of the LCVR nucleic acid sequences listed in Table 2, or a substantially similar sequence thereof having at least 90%, at least 95%, at least 98% or at least 99% sequence identity thereto.

[0023] The present invention also provides nucleic acid molecules encoding any of the HCDR1 amino acid sequences listed in Table 1; in certain embodiments the nucleic acid molecule comprises a polynucleotide sequence selected from any of the HCDR1 nucleic acid sequences listed in Table 2, or a substantially similar sequence thereof having at least 90%, at least 95%, at least 98% or at least 99% sequence identity thereto.

[0024] The present invention also provides nucleic acid molecules encoding any of the HCDR2 amino acid sequences listed in Table 1; in certain embodiments the nucleic acid molecule comprises a polynucleotide sequence selected from any of the HCDR2 nucleic acid sequences listed in Table 2, or a substantially similar sequence thereof having at least 90%, at least 95%, at least 98% or at least 99% sequence identity thereto.

[0025] The present invention also provides nucleic acid molecules encoding any of the HCDR3 amino acid sequences listed in Table 1; in certain embodiments the nucleic acid molecule comprises a polynucleotide sequence selected from any of the HCDR3 nucleic acid sequences listed in Table 2, or a substantially similar sequence thereof having at least 90%, at least 95%, at least 98% or at least 99% sequence identity thereto.

[0026] The present invention also provides nucleic acid molecules encoding any of the LCDR1 amino acid sequences listed in Table 1; in certain embodiments the nucleic acid molecule comprises a polynucleotide sequence selected from any of the LCDR1 nucleic acid sequences listed in Table 2, or a substantially similar sequence thereof having at least 90%, at least 95%, at least 98% or at least 99% sequence identity thereto.

[0027] The present invention also provides nucleic acid molecules encoding any of the LCDR2 amino acid sequences listed in Table 1; in certain embodiments the nucleic acid molecule comprises a polynucleotide sequence selected from any of the LCDR2 nucleic acid sequences listed in Table 2, or a substantially similar sequence thereof having at least 90%, at least 95%, at least 98% or at least 99% sequence identity thereto.

[0028] The present invention also provides nucleic acid molecules encoding any of the LCDR3 amino acid sequences listed in Table 1; in certain embodiments the nucleic acid molecule comprises a polynucleotide sequence selected from any of the LCDR3 nucleic acid sequences listed in Table 2, or a substantially similar sequence thereof having at least 90%, at least 95%, at least 98% or at least 99% sequence identity thereto.

[0029] The present invention also provides nucleic acid molecules encoding an HCVR, wherein the HCVR comprises a set of three CDRs (i.e., HCDR1-HCDR2-HCDR3), wherein the HCDR1-HCDR2-HCDR3 amino acid sequence set is as defined by any of the exemplary anti-PSMA antibodies listed in Table 1.

[0030] The present invention also provides nucleic acid molecules encoding an LCVR, wherein the LCVR comprises a set of three CDRs (i.e., LCDR1-LCDR2-LCDR3), wherein the LCDR1-LCDR2-LCDR3 amino acid sequence set is as defined by any of the exemplary anti-PSMA antibodies listed in Table 1.

[0031] The present invention also provides nucleic acid molecules encoding both an HCVR and an LCVR, wherein the HCVR comprises an amino acid sequence of any of the HCVR amino acid sequences listed in Table 1, and wherein the LCVR comprises an amino acid sequence of any of the LCVR amino acid sequences listed in Table 1. In certain embodiments, the nucleic acid molecule comprises a polynucleotide sequence selected from any of the HCVR nucleic acid sequences listed in Table 2, or a substantially similar sequence thereof having at least 90%, at least 95%, at least 98% or at least 99% sequence identity thereto, and a polynucleotide sequence selected from any of the LCVR nucleic acid sequences listed in Table 2, or a substantially similar sequence thereof having at least 90%, at least 95%, at least 98% or at least 99% sequence identity thereto. In certain embodiments according to this aspect of the invention, the nucleic acid molecule encodes an HCVR and LCVR, wherein the HCVR and LCVR are both derived from the same anti-PSMA antibody listed in Table 1.

[0032] The present invention also provides recombinant expression vectors capable of expressing a polypeptide comprising a heavy or light chain variable region of an anti-PSMA antibody. For example, the present invention includes recombinant expression vectors comprising any of the nucleic acid molecules mentioned above, i.e., nucleic acid molecules encoding any of the HCVR, LCVR, and/or CDR sequences as set forth in Table 1. Also included within the scope of the present invention are host cells into which such vectors have been introduced, as well as methods of producing the antibodies or portions thereof by culturing the host cells under conditions permitting production of the antibodies or antibody fragments, and recovering the antibodies and antibody fragments so produced.

[0033] The present invention includes anti-PSMA antibodies having a modified glycosylation pattern. In some embodiments, modification to remove undesirable glycosylation sites may be useful, or an antibody lacking a fucose moiety present on the oligosaccharide chain, for example, to increase antibody dependent cellular cytotoxicity (ADCC) function (see Shield et al. (2002) JBC 277:26733). In other applications, modification of galactosylation can be made in order to modify complement dependent cytotoxicity (CDC).

[0034] In another aspect, the invention provides a pharmaceutical composition comprising a recombinant human antibody or fragment thereof which specifically binds PSMA and a pharmaceutically acceptable carrier. In a related aspect, the invention features a composition which is a combination of an anti-PSMA antibody and a second therapeutic agent. In one embodiment, the second therapeutic agent is any agent that is advantageously combined with an anti-PSMA antibody. Additional combination therapies and co-formulations involving the anti-PSMA antibodies of the present invention are disclosed elsewhere herein.

[0035] In another aspect, the invention provides therapeutic methods for targeting/killing tumor cells expressing PSMA using an anti-PSMA antibody of the invention, wherein the therapeutic methods comprise administering a therapeutically effective amount of a pharmaceutical composition comprising an anti-PSMA antibody of the invention to a subject in need thereof. In some cases, the anti-PSMA antibodies (or antigen-binding fragments thereof) can be used for treating prostate cancer, or may be modified to be more cytotoxic by methods, including but not limited to, modified Fc domains to increase ADCC (see e.g. Shield et al. (2002) JBC 277:26733), radioimmunotherapy (Akhtar, et al., 2012, Prostate-Specific Membrane Antigen-Based Therapeutics; Adv Urol. 2012:973820), antibody-drug conjugates (Olson, W C and Israel, R J, 2014, Front Biosci (Landmark Ed). 19:12-33; DiPippo, et al. Feb. 15, 2015, The Prostate, 75(3):303-313, first published on line Oct. 18, 2014), or other methods for increasing the efficiency of tumor ablation.

[0036] The present invention also includes the use of an anti-PSMA antibody of the invention in the manufacture of a medicament for the treatment of a disease or disorder related to or caused by PSMA-expressing cells.

[0037] In yet another aspect, the invention provides monospecific anti-PSMA antibodies for diagnostic applications, such as, e.g., imaging reagents.

[0038] In yet another aspect, the invention provides therapeutic methods for stimulating T cell activation using an anti-CD3 antibody or antigen-binding portion of an antibody of the invention, wherein the therapeutic methods comprise administering a therapeutically effective amount of a pharmaceutical composition comprising an antibody

[0039] In another aspect, the present invention provides an isolated antibody or antigen-binding fragment thereof that binds human prostate-specific membrane antigen (PSMA) with a binding dissociation equilibrium constant (K_{D}) of less than about 80 nM as measured in a surface plasmon resonance assay at 37° C. In yet another aspect, the present invention provides an isolated antibody or antigen-binding fragment thereof that binds human PSMA with a dissociative half-life (t½) of greater than about 10 minutes as measured in a surface plasmon resonance assay at 37° C.

[0040] The invention further provides an antibody or antigen-binding fragment that competes for binding to human PSMA with a reference antibody comprising an HCVR/LCVR amino acid sequence pair as set forth in Table 1. In another aspect, the invention provides an antibody or antigen-binding fragment that competes for binding to human PSMA with a reference antibody comprising an HCVR/LCVR amino acid sequence pair selected from the group consisting of SEQ ID NOs: 2/1642; 10/1642; 18/1642; 26/1642; 34/1642; 42/1642; 50/1642; 58/1642; 66/1642; 74/1642; 82/1642; 90/1642; 98/1642; 106/1642; 114/1642; 122/130; and 138/146.

[0041] The invention furthermore provides an antibody or antigen-binding fragment, wherein the antibody or antigen-binding fragment thereof binds to the same epitope on human PSMA as a reference antibody comprising an HCVR/LCVR amino acid sequence pair as set forth in Table 1. In another aspect, the antibody or antigen-binding fragment binds to the same epitope on human PSMA as a reference antibody comprising an HCVR/LCVR amino acid sequence pair selected from the group consisting of SEQ ID NOs: 2/1642; 10/1642; 18/1642; 26/1642; 34/1642; 42/1642; 50/1642; 58/1642; 66/1642; 74/1642; 82/1642; 90/1642; 98/1642; 106/1642; 114/1642; 122/130; and 138/146.

[0042] The invention further provides an isolated antibody or antigen-binding fragment thereof that binds human PSMA, wherein the antibody or antigen-binding fragment comprises: the complementarity determining regions (CDRs) of a heavy chain variable region (HCVR) having an amino acid sequence as set forth in Table 1; and the CDRs of a light chain variable region (LCVR) having an amino acid sequence as set forth in Table 1. In another aspect, the isolated antibody or antigen-binding fragment comprises the heavy and light chain CDRs of a HCVR/LCVR amino acid sequence pair selected from the group consisting of: SEQ ID NOs: 2/1642; 10/1642; 18/1642; 26/1642; 34/1642; 42/1642; 50/1642; 58/1642; 66/1642; 74/1642; 82/1642; 90/1642; 98/1642; 106/1642; 114/1642; 122/130; and 138/146. In yet another aspect, the isolated antibody or antigen-binding fragment comprises HCDR1-HCDR2-HCDR3-LCDR1-LCDR2-LCDR3 domains, respectively, selected from the group consisting of: SEQ ID NOs: 4-6-8-1644-1646-1648; Dec. 14, 2016-1644-1646-1648; 20-22-24-1644-1646-1648; 28-30-32-1644-1646-1648; 36-38-40-1644-1646-1648; 44-46-48-1644-1646-1648; 52-54-56-1644-1646-1648; 60-62-64-1644-1646-1648; 68-70-72-1644-1646-1648; 76-78-80-1644-1646-1648; 84-86-88-1644-1646-1648; 92-94-96-1644-1646-1648; 100-102-104-1644-1646-1648; 108-110-112-1644-1646-1648; 116-118-120-1644-1646-1648; 124-126-128-132-134-136; and 140-142-144-148-150-152.

[0043] In another aspect, the invention provides an isolated antibody or antigen-binding fragment thereof that binds human PSMA, wherein the antibody or antigen-binding fragment comprises: (a) a heavy chain variable region (HCVR) having an amino acid sequence selected from the group consisting of SEQ ID NOs: 2, 10, 18, 26, 34, 42, 50, 58, 66, 74, 82, 90, 98, 106, 114, 122, and 138; and (b) a light chain variable region (LCVR) having an amino acid sequence selected from the group consisting of SEQ ID NOs: 130 and 146. In a further aspect, the isolated antibody or antigen-binding fragment of claim 10, wherein the antibody or antigen-binding fragment comprises a HCVR/LCVR amino acid sequence pair selected from the group consisting of: SEQ ID NOs: 2/1642; 10/1642; 18/1642; 26/1642; 34/1642; 42/1642; 50/1642; 58/1642; 66/1642; 74/1642; 82/1642; 90/1642; 98/1642; 106/1642; 114/1642; 122/130; and 138/146.

[0044] According to another aspect, the present invention provides bispecific antigen-binding molecules (e.g., antibodies) that bind PSMA and CD3. Such bispecific antigen-binding molecules are also referred to herein as “anti-PSMA/anti-CD3 bispecific molecules,” “anti-CD3/anti-PSMA bispecific molecules,” or “PSMAxCD3 bsAbs.” The anti-PSMA portion of the anti-PSMA/anti-CD3 bispecific molecule is useful for targeting cells (e.g., tumor cells) that express PSMA (e.g., prostate tumors), and the anti-CD3 portion of the bispecific molecule is useful for activating T-cells. The simultaneous binding of PSMA on a tumor cell and CD3 on a T-cell facilitates directed killing (cell lysis) of the targeted tumor cell by the activated T-cell. The anti-PSMA/anti-CD3 bispecific molecules of the invention are therefore useful, inter alia, for treating diseases and disorders related to or caused by PSMA-expressing tumors (e.g., prostate cancers).

[0045] The bispecific antigen-binding molecules according to this aspect of the present invention comprise a first antigen-binding domain that specifically binds human CD3, and a second antigen-binding domain that specifically binds PSMA. The present invention includes anti-PSMA/anti-CD3 bispecific molecules (e.g., bispecific antibodies) wherein each antigen-binding domain comprises a heavy chain variable region (HCVR) paired with a light chain variable region (LCVR). In certain exemplary embodiments of the invention, the anti-CD3 antigen-binding domain and the anti-PSMA antigen binding domain each comprise different, distinct HCVRs paired with a common LCVR. For example, as illustrated in Example 4 herein, bispecific antibodies were constructed comprising a first antigen-binding domain that specifically binds CD3, wherein the first antigen-binding domain comprises an HCVR/LCVR pair derived from an anti-CD3 antibody; and a second antigen-binding domain that specifically binds PSMA, wherein the second antigen-binding domain comprises an HCVR derived from an anti-PSMA antibody paired with an LCVR derived from an anti-CD3 antibody (e.g., the same LCVR that is included in the anti-CD3 antigen-binding domain). In other words, in the exemplary molecules disclosed herein, the pairing of an HCVR from an anti-PSMA antibody with an LCVR from an anti-CD3 antibody creates an antigen-binding domain that specifically binds PSMA (but does not bind CD3). In such embodiments, the first and second antigen-binding domains comprise distinct anti-CD3 and anti-PSMA HCVRs but share a common anti-CD3 LCVR. In other embodiments, the bispecific antigen-binding molecules comprise distinct anti-CD3 and anti-PSMA HCVRs, but share a common LCVR. The amino acid sequence of this LCVR is shown, e.g., in SEQ ID NO:1386, and the amino acid sequences of the corresponding CDRs (i.e., LCDR1-LCDR2-LCDR3) are shown in SEQ ID NOs: 1388, 1390 and 1392, respectively. Genetically modified mice can be used to produce fully human bispecific antigen-binding molecules comprising two different heavy chains that associate with an identical light chain that comprises a variable domain derived from one of two different human light chain variable region gene segments. Alternatively, variable heavy chains may be paired with one common light chain and expressed recombinantly in host cells. As such, the antibodies of the invention can comprise immunoglobulin heavy chains associated with a single rearranged light chain. In some embodiments, the light chain comprises a variable domain derived from a human Vκ1-39 gene segment or a Vκ3-20 gene segment. In other embodiments, the light chain comprises a variable domain derived from a human Vκ1-39 gene segment rearranged with a human JK5 or a human JK1 gene segment.

[0046] The present invention provides anti-CD3/anti-PSMA bispecific molecules, wherein the first antigen-binding domain that specifically binds CD3 comprises any of the HCVR amino acid sequences, any of the LCVR amino acid sequences, any of the HCVR/LCVR amino acid sequence pairs, any of the heavy chain CDR1-CDR2-CDR3 amino acid sequences, or any of the light chain CDR1-CDR2-CDR3 amino acid sequences as set forth in US publication 2014/0088295.

[0047] In addition, the present invention provides anti-CD3/anti-PSMA bispecific molecules, wherein the first antigen-binding domain that specifically binds CD3 comprises any of the HCVR amino acid sequences as set forth in Tables 12, 14, and 18 herein. The first antigen-binding domain that specifically binds CD3 may also comprise any of the LCVR amino acid sequences as set forth in Tables 12, 15, and 20 herein. According to certain embodiments, the first antigen-binding domain that specifically binds CD3 comprises any of the HCVR/LCVR amino acid sequence pairs as set forth in Tables 12, 14, 15, 18, and 20 herein. The present invention also provides anti-CD3/anti-PSMA bispecific molecules, wherein the first antigen-binding domain that specifically binds CD3 comprises any of the heavy chain CDR1-CDR2-CDR3 amino acid sequences as set forth in Tables 12, 14, and 18 herein, and/or any of the light chain CDR1-CDR2-CDR3 amino acid sequences as set forth in Tables 12, 15, and 20 herein.

[0048] According to certain embodiments, the present invention provides anti-CD3/anti-PSMA bispecific molecules, wherein the first antigen-binding domain that specifically binds CD3 comprises a heavy chain variable region (HCVR) having an amino acid sequence as set forth in Tables 12, 14, and 18 herein or a substantially similar sequence thereof having at least 90%, at least 95%, at least 98% or at least 99% sequence identity.

[0049] The present invention also provides anti-CD3/anti-PSMA bispecific molecules, wherein the first antigen-binding domain that specifically binds CD3 comprises a light chain variable region (LCVR) having an amino acid sequence as set forth in Tables 12, 15, and 20 herein, or a substantially similar sequence thereof having at least 90%, at least 95%, at least 98% or at least 99% sequence identity.

[0050] The present invention also provides anti-CD3/anti-PSMA bispecific molecules, wherein the first antigen-binding domain that specifically binds CD3 comprises a HCVR and LCVR (HCVR/LCVR) amino acid sequence pair as set forth in Tables 12, 14, 15, 18, and 20 herein.

[0051] The present invention also provides anti-CD3/anti-PSMA bispecific molecules, wherein the first antigen-binding domain that specifically binds CD3 comprises a heavy chain CDR3 (HCDR3) domain having an amino acid sequence as set forth in Tables 12, 14, and 18 herein, or a substantially similar sequence thereto having at least 90%, at least 95%, at least 98% or at least 99% sequence identity; and a light chain CDR3 (LCDR3) domain having an amino acid sequence as set forth in Tables 12, 15, and 20 herein, or a substantially similar sequence thereof having at least 90%, at least 95%, at least 98% or at least 99% sequence identity.

[0052] In certain embodiments, the first antigen-binding domain that specifically binds CD3 comprises a HCDR3/LCDR3 amino acid sequence pair as set forth in Tables 12, 14, 15, 18, and 20 herein.

[0053] The present invention also provides anti-CD3/anti-PSMA bispecific antigen-binding molecules, wherein the first antigen-binding domain that specifically binds CD3 comprises a heavy chain CDR1 (HCDR1) domain having an amino acid as set forth in Tables 12, 14, and 18 herein, or a substantially similar sequence thereof having at least 90%, at least 95%, at least 98% or at least 99% sequence identity; a heavy chain CDR2 (HCDR2) domain having an amino acid as set forth in Tables 12, 14, and 18, or a substantially similar sequence thereof having at least 90%, at least 95%, at least 98% or at least 99% sequence identity; a heavy chain CDR3 (HCDR3) domain having an amino acid as set forth in Tables 12, 14, and 18, or a substantially similar sequence thereof having at least 90%, at least 95%, at least 98% or at least 99% sequence identity; a light chain CDR1 (LCDR1) domain having an amino acid sequence as set forth in Tables 12, 15, and 20 herein, or a substantially similar sequence thereof having at least 90%, at least 95%, at least 98% or at least 99% sequence identity; a light chain CDR2 (LCDR2) domain having an amino acid sequence as set forth in Tables 12, 15, and 20 herein, or a substantially similar sequence thereof having at least 90%, at least 95%, at least 98% or at least 99% sequence identity, and a light chain CDR3 (LCDR3) domain having an amino acid sequence as set forth in Tables 12, 15, and 20 herein, or a substantially similar sequence thereof having at least 90%, at least 95%, at least 98% or at least 99% sequence identity.

[0054] Certain non-limiting, exemplary anti-CD3/anti-PSMA bispecific antigen-binding molecules of the invention include a first antigen-binding domain that specifically binds CD3 comprising HCDR1-HCDR2-HCDR3-LCDR1-LCDR2-LCDR3 domains, respectively, having the amino acid sequences as set forth in Tables 12, 14, 15, 18, and 20 herein.

[0055] The present invention further provides a bispecific antigen-binding molecule, wherein the first antigen-binding domain that specifically binds human CD3 comprises heavy chain complementarity determining regions (HCDR1, HCDR2 and HCDR3) from a heavy chain variable region (HCVR) comprising an amino acid sequence as set forth in Table 12, Table 14, or Table 18 and light chain complementarity determining regions (LCDR1, LCDR2 and LCDR3) from a light chain variable region (LCVR) comprising an amino acid sequence as set forth in Table 12, Table 15, or Table 20.

[0056] In another aspect, the invention provides a bispecific antigen-binding molecule wherein the first antigen-binding domain that specifically binds human CD3 comprises heavy chain complementarity determining regions (HCDR1, HCDR2 and HCDR3) from a heavy chain variable region (HCVR) selected from the group consisting of SEQ ID NOs: 922, 154, 1482, 1490, 1498, 1506, 1514, 1522, 1530, 1538, 1546, 1554, 1562, 1570, 1578, 1586, 1594, 1602, 1610, 1618, and 1626, and light chain complementarity determining regions (LCDR1, LCDR2 and LCDR3) from a light chain variable region (LCVR) comprising an amino acid sequence selected from the group consisting of SEQ ID NOs: 162, 930 and 1642.

[0057] The invention further provides a bispecific antigen-binding molecule, wherein the first antigen-binding domain that specifically binds human CD3 comprises three heavy chain complementarity determining regions (A1-HCDR1, A1-HCDR2 and A1-HCDR3) and three light chain complementarity determining regions (A1-LCDR1, A1-LCDR2 and A1-LCDR3), wherein A1-HCDR1 comprises an amino acid sequence selected from the group consisting of SEQ ID NOs: 924, 156; 1484, 1492, 1500, 1508, 1516, 1524, 1532, 1540, 1548, 1556, 1564, 1572, 1580, 1588, 1596, 1604, 1612, 1620, and 1628; A1-HCDR2 comprises an amino acid sequence selected from the group consisting of SEQ ID NOs: 926, 158, 1486, 1494, 1502, 1510, 1518, 1526, 1534, 1542, 1550, 1558, 1566, 1574, 1582, 1590, 1598, 1606, 1614, 1622, and 1630; A1-HCDR3 comprises an amino acid sequence selected from the group consisting of SEQ ID NOs: 928, 160, 1488, 1496, 1504, 1512, 1520, 1528, 1536, 1544, 1552, 1560, 1568, 1576, 1584, 1592, 1600, 1608, 1616, 1624, and 1632; A1-LCDR1 comprises an amino acid sequence selected from the group consisting of SEQ ID NOs: 932, 164, and 1644; A1-LCDR2 comprises an amino acid sequence selected from the group consisting of SEQ ID NOs: 166, 934 and 1646; and A1-LCDR3 comprises an amino acid sequence selected from the group consisting of SEQ ID NOs: 168, 936 and 1648.

[0058] In a further aspect, the invention provides a bispecific antigen-binding molecule, wherein the first antigen-binding domain that specifically binds human CD3 comprises the heavy and light chain CDRs of a HCVR/LCVR amino acid sequence pair selected from the group consisting of: SEQ ID NOs: 922/930, 154/162, 1482/1642, 1490/1642, 1498/1642, 1506/1642, 1514/1642, 1522/1642, 1530/1642, 1538/1642, 1546/1642, 1554/1642, 1562/1642, 1570/1642, 1578/1642, 1586/1642, 1594/1642, 1602/1642, 1610/1642, 1618/1642, and 1626/1642

[0059] In another aspect, the invention provides a bispecific antigen-binding molecule, wherein the first antigen-binding domain that specifically binds human CD3 comprises three heavy chain complementarity determining regions (A1-HCDR1, A1-HCDR2 and A1-HCDR3) and three light chain complementarity determining regions (A1-LCDR1, A1-LCDR2 and A1-LCDR3), and wherein the second antigen-binding domain that specifically binds human PSMA comprises three heavy chain complementarity determining regions (A2-HCDR1, A2-HCDR2 and A2-HCDR3) and three light chain complementarity determining regions (A2-LCDR1, A2-LCDR2 and A2-LCDR3); wherein A1-HCDR1 comprises an amino acid sequence selected from the group consisting of SEQ ID NOs: 924, 156, 1484, 1492, 1500, 1508, 1516, 1524, 1532, 1540, 1548, 1556, 1564, 1572, 1580, 1588, 1596, 1604, 1612, 1620, and 1628; A1-HCDR2 comprises an amino acid sequence selected from the group consisting of SEQ ID NOs: 926, 158, 1486, 1494, 1502, 1510, 1518, 1526, 1534, 1542, 1550, 1558, 1566, 1574, 1582, 1590, 1598, 1606, 1614, 1622, and 1630; A1-HCDR3 comprises an amino acid sequence selected from the group consisting of SEQ ID NOs: 928, 160, 1488, 1496, 1504, 1512, 1520, 1528, 1536, 1544, 1552, 1560, 1568, 1576, 1584, 1592, 1600, 1608, 1616, 1624, and 1632; A1-LCDR1 comprises an amino acid sequence selected from the group consisting of SEQ ID NOs: 164, 932, and 1644; A1-LCDR2 comprises an amino acid sequence selected from the group consisting of SEQ ID NOs: 166, 934, and 1646; and A1-LCDR3 comprises an amino acid sequence selected from the group consisting of SEQ ID NOs: 168, 936, and 1648; and wherein A2-HCDR1 comprises an amino acid sequence selected from the group consisting of SEQ ID NOs: 124 and 68; A2-HCDR2 comprises an amino acid sequence selected from the group consisting of SEQ ID NOs: 126 and 70; A2-HCDR3 comprises an amino acid sequence selected from the group consisting of SEQ ID NOs: 128 and 72; A2-LCDR1 comprises an amino acid sequence selected from the group consisting of SEQ ID NOs: 932, 164, and 1644; A2-LCDR2 comprises an amino acid sequence selected from the group consisting of SEQ ID NOs: 934, 166, and 1646; and A2-LCDR3 comprises an amino acid sequence selected from the group consisting of SEQ ID NOs: 936, 168, and 1648.

[0060] Certain non-limiting, exemplary anti-CD3/anti-PSMA bispecific antigen-binding molecules of the invention include a first antigen-binding domain that specifically binds CD3 comprising a heavy chain comprising variable domain framework regions having an amino acid sequence selected from FR1 (SEQ ID NO: 1654), FR2 (SEQ ID NO: 1656), FR3 (SEQ ID NO: 1657), and FR4 (SEQ ID NO: 1658).

[0061] In more embodiments, exemplary anti-CD3/anti-PSMA bispecific antigen-binding molecules of the invention include a bispecific antigen-binding molecule wherein the first antigen-binding domain that specifically binds human CD3 comprises a HCVR comprising HCDR1-HCDR2-HCDR3 having the amino acid sequences of SEQ ID NOs: 1659-1660-1661.

[0062] The present invention also provides anti-CD3/anti-PSMA bispecific molecules, wherein the second antigen-binding domain that specifically binds PSMA comprises a heavy chain variable region (HCVR) having the amino acid sequence selected from the group consisting of SEQ ID NOs: 2, 10, 18, 26, 34, 42, 50, 58, 66, 74, 82, 90, 98, 106, 114, 122, and 138, or a substantially similar sequence thereof having at least 90%, at least 95%, at least 98% or at least 99% sequence identity.

[0063] The present invention also provides anti-CD3/anti-PSMA bispecific molecules, wherein the second antigen-binding domain that specifically binds PSMA comprises a light chain variable region (LCVR) having the amino acid sequence selected from the group consisting of SEQ ID NOs: 930, 162, and 1642, or a substantially similar sequence thereof having at least 90%, at least 95%, at least 98% or at least 99% sequence identity.

[0064] The present invention also provides anti-CD3/anti-PSMA bispecific molecules, wherein the second antigen-binding domain that specifically binds PSMA comprises a HCVR and LCVR (HCVR/LCVR) amino acid sequence pair selected from the group consisting of SEQ ID NOs: 122/930, 122/162, and 66/1642.

[0065] The present invention also provides anti-CD3/anti-PSMA bispecific molecules, wherein the second antigen-binding domain that specifically binds PSMA comprises a heavy chain CDR3 (HCDR3) domain having an amino acid sequence selected from the group consisting of SEQ ID NOs: 8, 16, 24, 32, 40, 48, 56, 64, 72, 80, 88, 96, 104, 112, 120, 128, and 144, or a substantially similar sequence thereto having at least 90%, at least 95%, at least 98% or at least 99% sequence identity; and a light chain CDR3 (LCDR3) domain having an amino acid sequence selected from the group consisting of SEQ ID NOs: 936, 168, and 1648, or a substantially similar sequence thereof having at least 90%, at least 95%, at least 98% or at least 99% sequence identity.

[0066] In certain embodiments, the second antigen-binding domain that specifically binds PSMA comprises a HCDR3/LCDR3 amino acid sequence pair selected from the group consisting of SEQ ID NOs: 128/936, 128/168, and 72/1648.

[0067] The present invention also provides anti-CD3/anti-PSMA bispecific antigen-binding molecules, wherein the second antigen-binding domain that specifically binds PSMA comprises a heavy chain CDR1 (HCDR1) domain having an amino acid sequence selected from the group consisting of SEQ ID NOs: 4, 12, 20, 28, 36, 44, 52, 60, 68, 76, 84, 92, 100, 108, 116, 124, and 140, or a substantially similar sequence thereof having at least 90%, at least 95%, at least 98% or at least 99% sequence identity; a heavy chain CDR2 (HCDR2) domain having an amino acid sequence selected from the group consisting of SEQ ID NOs: 6, 14, 22, 30, 38, 46, 54, 62, 70, 78, 86, 94, 102, 110, 118, 126 and 142, or a substantially similar sequence thereof having at least 90%, at least 95%, at least 98% or at least 99% sequence identity; a heavy chain CDR3 (HCDR3) domain having an amino acid sequence selected from the group consisting of SEQ ID NOs: 8, 16, 24, 32, 40, 48, 56, 64, 72, 80, 88, 96, 104, 112, 120, 128, and 144, or a substantially similar sequence thereof having at least 90%, at least 95%, at least 98% or at least 99% sequence identity; a light chain CDR1 (LCDR1) domain having an amino acid sequence selected from the group consisting of SEQ ID NOs: 932, 164, and 1644, or a substantially similar sequence thereof having at least 90%, at least 95%, at least 98% or at least 99% sequence identity; and a light chain CDR2 (LCDR2) domain having an amino acid sequence selected from the group consisting of SEQ ID NOs: 934, 166, and 1646, or a substantially similar sequence thereof having at least 90%, at least 95%, at least 98% or at least 99% sequence identity; and a light chain CDR3 (LCDR3) domain having an amino acid sequence selected from the group consisting of SEQ ID NOs: 936, 168, and 1648, or a substantially similar sequence thereof having at least 90%, at least 95%, at least 98% or at least 99% sequence identity.

[0068] Certain non-limiting, exemplary anti-CD3/anti-PSMA bispecific antigen-binding molecules of the invention include a second antigen-binding domain that specifically binds PSMA comprising HCDR1-HCDR2-HCDR3-LCDR1-LCDR2-LCDR3 domains, respectively, having the amino acid sequences selected from the group consisting of: SEQ ID NOs: 124-126-128-932-934-936, 124-126-128-164-166-168, and 68-70-72-1644-1646-1648.

[0069] In a related embodiment, the invention includes anti-CD3/anti-PSMA bispecific antigen-binding molecules wherein the second antigen-binding domain that specifically binds PSMA comprises the heavy and light chain CDR domains contained within heavy and light chain variable region (HCVR/LCVR) sequences selected from the group consisting of SEQ ID NOs: 122/930, 122/162, and 66/1642.

[0070] In another aspect, the invention provides a bispecific antigen-binding molecule comprising a first antigen-binding domain that binds human CD3 and a second antigen-binding domain that binds human PSMA, wherein the second antigen-binding domain is derived from the antibody or antigen-binding fragment of any one of the anti-PSMA antibodies of the invention. In a further aspect, the invention provides a bispecific antigen-binding molecule comprising a first antigen-binding domain that specifically binds human CD3, and a second antigen-binding domain that specifically binds human PSMA.

[0071] The invention further provides a bispecific antigen-binding molecule which binds human cells expressing human CD3 and cynomolgus monkey cells expressing cynomolgus CD3. In another aspect, the bispecific antigen-binding molecule binds human cells expressing human PSMA and cynomolgus monkey cells expressing cynomolgus PSMA.

[0072] In another aspect the invention provides a bispecific antigen-binding molecule which inhibits tumor growth in immunocompromised mice bearing human prostate cancer xenografts. The invention further provides a bispecific antigen-binding molecule which inhibits tumor growth in immunocompetent mice bearing human prostate cancer xenografts. The invention further provides a bispecific antigen-binding molecule which suppresses tumor growth of established tumors in immunocompromised mice bearing human prostate cancer xenografts. The invention further provides a bispecific antigen-binding molecule which reduces tumor growth of established tumors in immunocompetent mice bearing human prostate cancer xenografts.

[0073] In another aspect the invention provides a bispecific antigen-binding molecule comprising i) a first antigen-binding domain that specifically binds an effector cell with an EC₅₀ value of greater than about 40 nM and, and ii) a second antigen-binding domain that specifically binds a target human prostate tumor cell with an EC₅₀ value of less than 40 nM, wherein such EC₅₀ binding affinity value is measured in an in vitro FACS binding assay.

[0074] For example, the bispecific antigen-binding molecule can include a first antigen-binding domain that specifically binds human CD3 with an EC₅₀ value of greater than about 40 nM, or greater than about 100 nM, greater than about 200 nM, or greater than about 1 μM. In one embodiment, the bispecific antigen-binding molecule can include a second antigen-binding domain that specifically binds the target prostate tumor cell with an EC₅₀ value of less than about 6 nM. In some cases, the first antigen-binding domain specifically binds each of human CD3 and cynomolgus CD3 with an EC₅₀ value of greater than about 40 nM, greater than about 100 nM, greater than about 200 nM, or greater than about 1 μM. In some cases, the first antigen-binding domain specifically binds each of human CD3 and cynomolgus CD3 with weak or no measurable affinity.

[0075] In some embodiments, the antigen-binding molecule induces T cell-mediated tumor cell killing with an EC₅₀ value of less than about 1.3 nM, as measured in an in vitro T cell-mediated tumor cell killing assay, for example, where the tumor cells are C4-2, 22Rv1, and TRAMPC2_PSMA cells.

[0076] In some applications, the first antigen-binding domain binds human CD3 with an K_{D} value of greater than about 11 nM, as measured in an in vitro surface plasmon resonance binding assay. In some instances, the first antigen-binding domain binds each of human CD3 and cynomolgus CD3 with an K_{D} value of greater than about 15 nM, greater than about 30 nM, greater than about 60 nM, greater than about 120 nM, or greater than about 300 nM, as measured in an in vitro surface plasmon resonance binding assay.

[0077] In certain embodiments, anti-CD3 antibodies of the invention, antigen-binding fragments and bispecific antibodies thereof were made by replacing amino acid residues of a parental in a stepwise manner based on differences between the germline sequence and the parental antibody sequence.

[0078] In some embodiments, the invention provides a bispecific antigen-binding molecule, wherein the second antigen-binding domain competes for binding to human PSMA with a reference antigen-binding protein comprising three heavy chain complementarity determining regions (A2-HCDR1, A2-HCDR2 and A2-HCDR3) and three light chain complementarity determining regions (A2-LCDR1, A2-LCDR2 and A2-LCDR3), wherein A2-HCDR1 comprises an amino acid sequence selected from the group consisting of SEQ ID NOs: 124 and 68; A2-HCDR2 comprises an amino acid sequence selected from the group consisting of SEQ ID NOs: 126 and 70; A2-HCDR3 comprises an amino acid sequence selected from the group consisting of SEQ ID NOs: 128 and 72; A2-LCDR1 comprises an amino acid sequence selected from the group consisting of SEQ ID NOs: 164, 932 and 1644; A2-LCDR2 comprises an amino acid sequence selected from the group consisting of SEQ ID NOs: 166, 934 and 1646; and A2-LCDR3 comprises an amino acid sequence selected from the group consisting of SEQ ID NOs: 168, 936, and 1648. In some embodiments, the invention provides a bispecific antigen-binding molecule, wherein the second antigen-binding domain competes for binding to human PSMA with a reference antigen-binding protein comprising a heavy chain variable region (HCVR) comprising an amino acid sequence selected from the group consisting of SEQ ID NOs: 122 and 66, and a light chain variable region (LCVR) comprising an amino acid sequence selected from the group consisting of SEQ ID NOs: 162, 930 and 1642.

[0079] In some embodiments, the invention provides a bispecific antigen-binding molecule, wherein the first antigen-binding domain competes for binding to human CD3 with a reference antigen-binding protein comprising three heavy chain complementarity determining regions (A1-HCDR1, A1-HCDR2 and A1-HCDR3) and three light chain complementarity determining regions (A1-LCDR1, A1-LCDR2 and A1-LCDR3), wherein A1-HCDR1 comprises an amino acid sequence selected from the group consisting of SEQ ID NOs: 924, 156, 1484, 1492, 1500, 1508, 1516, 1524, 1532, 1540, 1548, 1556, 1564, 1572, 1580, 1588, 1596, 1604, 1612, 1620, and 1628; A1-HCDR2 comprises an amino acid sequence selected from the group consisting of SEQ ID NOs: 926, 158, 1486, 1494, 1502, 1510, 1518, 1526, 1534, 1542, 1550, 1558, 1566, 1574, 1582, 1590, 1598, 1606, 1614, 1622, and 1630; A1-HCDR3 comprises an amino acid sequence selected from the group consisting of SEQ ID NOs: 928, 160, 1488, 1496, 1504, 1512, 1520, 1528, 1536, 1544, 1552, 1560, 1568, 1576, 1584, 1592, 1600, 1608, 1616, 1624, and 1632; A1-LCDR1 comprises an amino acid sequence selected from the group consisting of SEQ ID NOs: 164, 932, and 1644; A1-LCDR2 comprises an amino acid sequence selected from the group consisting of SEQ ID NOs: 166, 934, and 1646; and A1-LCDR3 comprises an amino acid sequence selected from the group consisting of SEQ ID NOs: 168, 936, and 1648. In some embodiments, the invention provides a bispecific antigen-binding molecule, wherein the first antigen-binding domain competes for binding to human CD3 with a reference antigen-binding protein comprising a heavy chain variable region (HCVR) comprising an amino acid sequence selected from the group consisting of SEQ ID NOs: 922, 154, 1482, 1490, 1498, 1506, 1514, 1522, 1530, 1538, 1546, 1554, 1562, 1570, 1578, 1586, 1594, 1602, 1610, 1618, and 1626, and a light chain variable region (LCVR) comprising an amino acid sequence selected from the group consisting of SEQ ID NOs: 930, 162, and 1642.

[0080] In some embodiments, the invention provides a bispecific antigen-binding molecule, wherein the first antigen-binding domain competes for binding to human CD3 with a reference antigen-binding protein comprising a heavy chain variable region (HCVR) comprising an amino acid sequence selected from the group consisting of SEQ ID NOs: 922, 154, 1482, 1490, 1498, 1506, 1514, 1522, 1530, 1538, 1546, 1554, 1562, 1570, 1578, 1586, 1594, 1602, 1610, 1618, and 1626, and a light chain variable region (LCVR) comprising an amino acid sequence selected from the group consisting of SEQ ID NOs: 930, 162, and 1642; and wherein the second antigen-binding domain competes for binding to human PSMA with a reference antigen-binding protein comprising a heavy chain variable region (HCVR) comprising an amino acid sequence selected from the group consisting of SEQ ID NOs: 122 and 66, and a light chain variable region (LCVR) comprising an amino acid sequence selected from the group consisting of SEQ ID NOs: 930, 162, and 1642.

[0081] In one aspect, the invention provides a pharmaceutical composition comprising an anti-PSMA antigen-binding molecule or anti-PSMA/anti-CD3 bispecific antigen-binding molecule and a pharmaceutically acceptable carrier or diluent. The invention further provides a method for treating a cancer in a subject, the method comprising administering to the subject the pharmaceutical composition comprising an anti-PSMA antigen-binding molecule or anti-PSMA/anti-CD3 bispecific antigen-binding molecule and a pharmaceutically acceptable carrier or diluent. In some embodiments, the cancer is selected from the group consisting of prostate cancer, kidney cancer, bladder cancer, colorectal cancer, and gastric cancer. In some cases, the cancer is prostate cancer. In some cases, the prostate cancer is castrate-resistant prostate cancer.

[0082] In another aspect, the present invention provides nucleic acid molecules encoding any of the HCVR, LCVR or CDR sequences of the anti-CD3/anti-PSMA bispecific antigen-binding molecules disclosed herein, including nucleic acid molecules comprising the polynucleotide sequences as set forth in Tables 2, 13, 15, 17, 19, and 21 herein, as well as nucleic acid molecules comprising two or more of the polynucleotide sequences as set forth in Tables 2, 13, 15, 17, 19, and 21 in any functional combination or arrangement thereof. Recombinant expression vectors carrying the nucleic acids of the invention, and host cells into which such vectors have been introduced, are also encompassed by the invention, as are methods of producing the antibodies by culturing the host cells under conditions permitting production of the antibodies, and recovering the antibodies produced.

[0083] The present invention includes anti-CD3/anti-PSMA bispecific antigen-binding molecules wherein any of the aforementioned antigen-binding domains that specifically bind CD3 are combined, connected or otherwise associated with any of the aforementioned antigen-binding domains that specifically bind PSMA to form a bispecific antigen-binding molecule that binds CD3 and PSMA.

[0084] The present invention includes anti-CD3/anti-PSMA bispecific antigen-binding molecules having a modified glycosylation pattern. In some applications, modification to remove undesirable glycosylation sites may be useful, or an antibody lacking a fucose moiety present on the oligosaccharide chain, for example, to increase antibody dependent cellular cytotoxicity (ADCC) function (see Shield et al. (2002) JBC 277:26733). In other applications, modification of galactosylation can be made in order to modify complement dependent cytotoxicity (CDC).

[0085] In another aspect, the invention provides a pharmaceutical composition comprising an anti-CD3/anti-PSMA bispecific antigen-binding molecule as disclosed herein and a pharmaceutically acceptable carrier. In a related aspect, the invention features a composition which is a combination of an anti-CD3/anti-PSMA bispecific antigen-binding molecule and a second therapeutic agent. In one embodiment, the second therapeutic agent is any agent that is advantageously combined with an anti-CD3/anti-PSMA bispecific antigen-binding molecule. Exemplary agents that may be advantageously combined with an anti-CD3/anti-PSMA bispecific antigen-binding molecule are discussed in detail elsewhere herein.

[0086] In yet another aspect, the invention provides therapeutic methods for targeting/killing tumor cells expressing PSMA using an anti-CD3/anti-PSMA bispecific antigen-binding molecule of the invention, wherein the therapeutic methods comprise administering a therapeutically effective amount of a pharmaceutical composition comprising an anti-CD3/anti-PSMA bispecific antigen-binding molecule of the invention to a subject in need thereof.

[0087] The present invention also includes the use of an anti-CD3/anti-PSMA bispecific antigen-binding molecule of the invention in the manufacture of a medicament for the treatment of a disease or disorder related to or caused by PSMA-expressing cells.

[0088] Other embodiments will become apparent from a review of the ensuing detailed description.

### BRIEF DESCRIPTION OF THE DRAWINGS

[0089] FIG. 1 illustrates that PSMAxCD3 bispecific antibody inhibits growth of a human prostate cell line in vivo. NSG mice were co-implanted with 22Rv1 cells and human PBMCs subcutaneously. The animals were dosed three times total on Days 0, 3 and 7 with 1 ug of PSMAxCD3 bispecific i.p. Data are expressed as mean (SEM) and were analyzed using analysis of variance (ANOVA).

[0090] FIGS. 2A-2D show that treatment with a PSMAxCD3 bispecific antibody induces transient dose-dependent increase in circulating cytokines, where the cytokine levels (interferon-gamma, IFN-g; tumor necrosis factor, TNF; interleukin-2, IL-2; and interleukin-6, IL-6) are tested at 4 hrs after treatment.

[0091] FIGS. 3A-3B illustrate that treatment with PSMAxCD3 bispecific antibody in a humanized T cell mouse (100 μg/mouse) induces acute increase in cytokines (e.g. IFNg) (FIG. 3A) as well as transient decrease in circulating T cells (FIG. 3B).

[0092] FIGS. 4A-4C illustrate the effect of PSMAxCD3 bispecific antibodies on effector T cells in the spleen of the immunocompetent mice.

### DETAILED DESCRIPTION

[0093] Before the present invention is described, it is to be understood that this invention is not limited to particular methods and experimental conditions described, as such methods and conditions may vary. It is also to be understood that the terminology used herein is for the purpose of describing particular embodiments only, and is not intended to be limiting, since the scope of the present invention will be limited only by the appended claims.

[0094] Unless defined otherwise, all technical and scientific terms used herein have the same meaning as commonly understood by one of ordinary skill in the art to which this invention belongs. As used herein, the term “about,” when used in reference to a particular recited numerical value, means that the value may vary from the recited value by no more than 1%. For example, as used herein, the expression “about 100” includes 99 and 101 and all values in between (e.g., 99.1, 99.2, 99.3, 99.4, etc.).

[0095] Although any methods and materials similar or equivalent to those described herein can be used in the practice or testing of the present invention, the preferred methods and materials are now described. All patents, applications and non-patent publications mentioned in this specification are incorporated herein by reference in their entireties.

### Definitions

[0096] The expression “CD3,” as used herein, refers to an antigen which is expressed on T cells as part of the multimolecular T cell receptor (TCR) and which consists of a homodimer or heterodimer formed from the association of two of four receptor chains: CD3-epsilon, CD3-delta, CD3-zeta, and CD3-gamma. Human CD3-epsilon comprises the amino acid sequence as set forth in SEQ ID NO:1649; human CD3-delta comprises the amino acid sequence as set forth in SEQ ID NO: 1650. All references to proteins, polypeptides and protein fragments herein are intended to refer to the human version of the respective protein, polypeptide or protein fragment unless explicitly specified as being from a non-human species. Thus, the expression “CD3” means human CD3 unless specified as being from a non-human species, e.g., “mouse CD3,” “monkey CD3,” etc.

[0097] As used herein, “an antibody that binds CD3” or an “anti-CD3 antibody” includes antibodies and antigen-binding fragments thereof that specifically recognize a single CD3 subunit (e.g., epsilon, delta, gamma or zeta), as well as antibodies and antigen-binding fragments thereof that specifically recognize a dimeric complex of two CD3 subunits (e.g., gamma/epsilon, delta/epsilon, and zeta/zeta CD3 dimers). The antibodies and antigen-binding fragments of the present invention may bind soluble CD3 and/or cell surface expressed CD3. Soluble CD3 includes natural CD3 proteins as well as recombinant CD3 protein variants such as, e.g., monomeric and dimeric CD3 constructs, that lack a transmembrane domain or are otherwise unassociated with a cell membrane.

[0098] As used herein, the expression “cell surface-expressed CD3” means one or more CD3 protein(s) that is/are expressed on the surface of a cell in vitro or in vivo, such that at least a portion of a CD3 protein is exposed to the extracellular side of the cell membrane and is accessible to an antigen-binding portion of an antibody. “Cell surface-expressed CD3” includes CD3 proteins contained within the context of a functional T cell receptor in the membrane of a cell. The expression “cell surface-expressed CD3” includes CD3 protein expressed as part of a homodimer or heterodimer on the surface of a cell (e.g., gamma/epsilon, delta/epsilon, and zeta/zeta CD3 dimers). The expression, “cell surface-expressed CD3” also includes a CD3 chain (e.g., CD3-epsilon, CD3-delta or CD3-gamma) that is expressed by itself, without other CD3 chain types, on the surface of a cell. A “cell surface-expressed CD3” can comprise or consist of a CD3 protein expressed on the surface of a cell which normally expresses CD3 protein. Alternatively, “cell surface-expressed CD3” can comprise or consist of CD3 protein expressed on the surface of a cell that normally does not express human CD3 on its surface but has been artificially engineered to express CD3 on its surface.

[0099] The expression “PSMA,” as used herein, refers to prostate-specific membrane antigen, also known as folate hydrolase 1 (FOLH1). PSMA is an integral, non-shed membrane glycoprotein that is highly expressed in prostate epithelial cells and is a cell-surface marker for prostate cancer. The amino acid sequence of human PSMA is set forth in SEQ ID NO:1651.

[0100] As used herein, “an antibody that binds PSMA” or an “anti-PSMA antibody” includes antibodies and antigen-binding fragments thereof that specifically recognize PSMA.

[0101] The term “antigen-binding molecule” includes antibodies and antigen-binding fragments of antibodies, including, e.g., bispecific antibodies.

[0102] The term “antibody”, as used herein, means any antigen-binding molecule or molecular complex comprising at least one complementarity determining region (CDR) that specifically binds to or interacts with a particular antigen (e.g., PSMA or CD3). The term “antibody” includes immunoglobulin molecules comprising four polypeptide chains, two heavy (H) chains and two light (L) chains inter-connected by disulfide bonds, as well as multimers thereof (e.g., IgM). Each heavy chain comprises a heavy chain variable region (abbreviated herein as HCVR or V_{H}) and a heavy chain constant region. The heavy chain constant region comprises three domains, C_{H}1, C_{H}2 and C_{H}3. Each light chain comprises a light chain variable region (abbreviated herein as LCVR or V_{L}) and a light chain constant region. The light chain constant region comprises one domain (C_{L}1). The V_{H} and V_{L} regions can be further subdivided into regions of hypervariability, termed complementarity determining regions (CDRs), interspersed with regions that are more conserved, termed framework regions (FR). Each V_{H} and V_{L} is composed of three CDRs and four FRs, arranged from amino-terminus to carboxy-terminus in the following order: FR1, CDR1, FR2, CDR2, FR3, CDR3, FR4. In different embodiments of the invention, the FRs of the anti-PSMA antibody or anti-CD3 antibody (or antigen-binding portion thereof) may be identical to the human germline sequences, or may be naturally or artificially modified. An amino acid consensus sequence may be defined based on a side-by-side analysis of two or more CDRs.

[0103] The term “antibody”, as used herein, also includes antigen-binding fragments of full antibody molecules. The terms “antigen-binding portion” of an antibody, “antigen-binding fragment” of an antibody, and the like, as used herein, include any naturally occurring, enzymatically obtainable, synthetic, or genetically engineered polypeptide or glycoprotein that specifically binds an antigen to form a complex. Antigen-binding fragments of an antibody may be derived, e.g., from full antibody molecules using any suitable standard techniques such as proteolytic digestion or recombinant genetic engineering techniques involving the manipulation and expression of DNA encoding antibody variable and optionally constant domains. Such DNA is known and/or is readily available from, e.g., commercial sources, DNA libraries (including, e.g., phage-antibody libraries), or can be synthesized. The DNA may be sequenced and manipulated chemically or by using molecular biology techniques, for example, to arrange one or more variable and/or constant domains into a suitable configuration, or to introduce codons, create cysteine residues, modify, add or delete amino acids, etc.

[0104] Non-limiting examples of antigen-binding fragments include: (i) Fab fragments; (ii) F(ab′)2 fragments; (iii) Fd fragments; (iv) Fv fragments; (v) single-chain Fv (scFv) molecules; (vi) dAb fragments; and (vii) minimal recognition units consisting of the amino acid residues that mimic the hypervariable region of an antibody (e.g., an isolated complementarity determining region (CDR) such as a CDR3 peptide), or a constrained FR3-CDR3-FR4 peptide. Other engineered molecules, such as domain-specific antibodies, single domain antibodies, domain-deleted antibodies, chimeric antibodies, CDR-grafted antibodies, diabodies, triabodies, tetrabodies, minibodies, nanobodies (e.g. monovalent nanobodies, bivalent nanobodies, etc.), small modular immunopharmaceuticals (SMIPs), and shark variable IgNAR domains, are also encompassed within the expression “antigen-binding fragment,” as used herein.

[0105] An antigen-binding fragment of an antibody will typically comprise at least one variable domain. The variable domain may be of any size or amino acid composition and will generally comprise at least one CDR which is adjacent to or in frame with one or more framework sequences. In antigen-binding fragments having a V_{H} domain associated with a V_{L} domain, the V_{H} and V_{L} domains may be situated relative to one another in any suitable arrangement. For example, the variable region may be dimeric and contain V_{H}-V_{H}, V_{H}-V_{L} or V_{L}-V_{L} dimers. Alternatively, the antigen-binding fragment of an antibody may contain a monomeric V_{H} or V_{L} domain.

[0106] In certain embodiments, an antigen-binding fragment of an antibody may contain at least one variable domain covalently linked to at least one constant domain. Non-limiting, exemplary configurations of variable and constant domains that may be found within an antigen-binding fragment of an antibody of the present invention include: (i) V_{H}-C_{H}1; (ii) V_{H}-C_{H}2; (iii) V_{H}-C_{H}3; (iv) V_{H}-C_{H}1-C_{H}2; (v) V_{H}-C_{H}1-C_{H}2-C_{H}3; (vi) V_{H}-C_{H}2-C_{H}3; (vii) V_{H}-C_{L}; (viii) V_{L}-C_{H}1; (ix) V_{L}-C_{H}2; (x) V_{L}-C_{H}3; (xi) V_{L}-C_{H}1-C_{H}2; (xii) V_{L}-C_{H}1-C_{H}2-C_{H}3; (xiii) V_{L}-C_{H}2-C_{H}3; and (xiv) V_{L}-C_{L}. In any configuration of variable and constant domains, including any of the exemplary configurations listed above, the variable and constant domains may be either directly linked to one another or may be linked by a full or partial hinge or linker region. A hinge region may consist of at least 2 (e.g., 5, 10, 15, 20, 40, 60 or more) amino acids which result in a flexible or semi-flexible linkage between adjacent variable and/or constant domains in a single polypeptide molecule. Moreover, an antigen-binding fragment of an antibody of the present invention may comprise a homo-dimer or hetero-dimer (or other multimer) of any of the variable and constant domain configurations listed above in non-covalent association with one another and/or with one or more monomeric V_{H} or V_{L} domain (e.g., by disulfide bond(s)).

[0107] As with full antibody molecules, antigen-binding fragments may be monospecific or multispecific (e.g., bispecific). A multispecific antigen-binding fragment of an antibody will typically comprise at least two different variable domains, wherein each variable domain is capable of specifically binding to a separate antigen or to a different epitope on the same antigen. Any multispecific antibody format, including the exemplary bispecific antibody formats disclosed herein, may be adapted for use in the context of an antigen-binding fragment of an antibody of the present invention using routine techniques available in the art.

[0108] The antibodies of the present invention may function through complement-dependent cytotoxicity (CDC) or antibody-dependent cell-mediated cytotoxicity (ADCC). “Complement-dependent cytotoxicity” (CDC) refers to lysis of antigen-expressing cells by an antibody of the invention in the presence of complement. “Antibody-dependent cell-mediated cytotoxicity” (ADCC) refers to a cell-mediated reaction in which nonspecific cytotoxic cells that express Fc receptors (FcRs) (e.g., Natural Killer (NK) cells, neutrophils, and macrophages) recognize bound antibody on a target cell and thereby lead to lysis of the target cell. CDC and ADCC can be measured using assays that are well known and available in the art. (See, e.g., U.S. Pat. Nos. 5,500,362 and 5,821,337, and Clynes et al. (1998) Proc. Natl. Acad. Sci. (USA) 95:652-656). The constant region of an antibody is important in the ability of an antibody to fix complement and mediate cell-dependent cytotoxicity. Thus, the isotype of an antibody may be selected on the basis of whether it is desirable for the antibody to mediate cytotoxicity.

[0109] In certain embodiments of the invention, the anti-PSMA monospecific antibodies or anti-PSMA/anti-CD3 bispecific antibodies of the invention are human antibodies. The term “human antibody”, as used herein, is intended to include antibodies having variable and constant regions derived from human germline immunoglobulin sequences. The human antibodies of the invention may include amino acid residues not encoded by human germline immunoglobulin sequences (e.g., mutations introduced by random or site-specific mutagenesis in vitro or by somatic mutation in vivo), for example in the CDRs and in particular CDR3. However, the term “human antibody”, as used herein, is not intended to include antibodies in which CDR sequences derived from the germline of another mammalian species, such as a mouse, have been grafted onto human framework sequences.

[0110] The antibodies of the invention may, in some embodiments, be recombinant human antibodies. The term “recombinant human antibody”, as used herein, is intended to include all human antibodies that are prepared, expressed, created or isolated by recombinant means, such as antibodies expressed using a recombinant expression vector transfected into a host cell (described further below), antibodies isolated from a recombinant, combinatorial human antibody library (described further below), antibodies isolated from an animal (e.g., a mouse) that is transgenic for human immunoglobulin genes (see e.g., Taylor et al. (1992) Nucl. Acids Res. 20:6287-6295) or antibodies prepared, expressed, created or isolated by any other means that involves splicing of human immunoglobulin gene sequences to other DNA sequences. Such recombinant human antibodies have variable and constant regions derived from human germline immunoglobulin sequences. In certain embodiments, however, such recombinant human antibodies are subjected to in vitro mutagenesis (or, when an animal transgenic for human Ig sequences is used, in vivo somatic mutagenesis) and thus the amino acid sequences of the V_{H} and V_{L} regions of the recombinant antibodies are sequences that, while derived from and related to human germline V_{H} and V_{L} sequences, may not naturally exist within the human antibody germline repertoire in vivo.

[0111] Human antibodies can exist in two forms that are associated with hinge heterogeneity. In one form, an immunoglobulin molecule comprises a stable four chain construct of approximately 150-160 kDa in which the dimers are held together by an interchain heavy chain disulfide bond. In a second form, the dimers are not linked via inter-chain disulfide bonds and a molecule of about 75-80 kDa is formed composed of a covalently coupled light and heavy chain (half-antibody). These forms have been extremely difficult to separate, even after affinity purification.

[0112] The frequency of appearance of the second form in various intact IgG isotypes is due to, but not limited to, structural differences associated with the hinge region isotype of the antibody. A single amino acid substitution in the hinge region of the human IgG4 hinge can significantly reduce the appearance of the second form (Angal et al. (1993) Molecular Immunology 30:105) to levels typically observed using a human IgG1 hinge. The instant invention encompasses antibodies having one or more mutations in the hinge, C_{H}2 or C_{H}3 region which may be desirable, for example, in production, to improve the yield of the desired antibody form.

[0113] The antibodies of the invention may be isolated antibodies. An “isolated antibody,” as used herein, means an antibody that has been identified and separated and/or recovered from at least one component of its natural environment. For example, an antibody that has been separated or removed from at least one component of an organism, or from a tissue or cell in which the antibody naturally exists or is naturally produced, is an “isolated antibody” for purposes of the present invention. An isolated antibody also includes an antibody in situ within a recombinant cell. Isolated antibodies are antibodies that have been subjected to at least one purification or isolation step. According to certain embodiments, an isolated antibody may be substantially free of other cellular material and/or chemicals.

[0114] The present invention also includes one-arm antibodies that bind PSMA. As used herein, a “one-arm antibody” means an antigen-binding molecule comprising a single antibody heavy chain and a single antibody light chain. The one-arm antibodies of the present invention may comprise any of the HCVR/LCVR or CDR amino acid sequences as set forth in Table 1.

[0115] The anti-PSMA or anti-PSMA/anti-CD3 antibodies disclosed herein may comprise one or more amino acid substitutions, insertions and/or deletions in the framework and/or CDR regions of the heavy and light chain variable domains as compared to the corresponding germline sequences from which the antibodies were derived. Such mutations can be readily ascertained by comparing the amino acid sequences disclosed herein to germline sequences available from, for example, public antibody sequence databases. The present invention includes antibodies, and antigen-binding fragments thereof, which are derived from any of the amino acid sequences disclosed herein, wherein one or more amino acids within one or more framework and/or CDR regions are mutated to the corresponding residue(s) of the germline sequence from which the antibody was derived, or to the corresponding residue(s) of another human germline sequence, or to a conservative amino acid substitution of the corresponding germline residue(s) (such sequence changes are referred to herein collectively as “germline mutations”). A person of ordinary skill in the art, starting with the heavy and light chain variable region sequences disclosed herein, can easily produce numerous antibodies and antigen-binding fragments which comprise one or more individual germline mutations or combinations thereof. In certain embodiments, all of the framework and/or CDR residues within the V_{H} and/or V_{L} domains are mutated back to the residues found in the original germline sequence from which the antibody was derived. In other embodiments, only certain residues are mutated back to the original germline sequence, e.g., only the mutated residues found within the first 8 amino acids of FR1 or within the last 8 amino acids of FR4, or only the mutated residues found within CDR1, CDR2 or CDR3. In other embodiments, one or more of the framework and/or CDR residue(s) are mutated to the corresponding residue(s) of a different germline sequence (i.e., a germline sequence that is different from the germline sequence from which the antibody was originally derived). Furthermore, the antibodies of the present invention may contain any combination of two or more germline mutations within the framework and/or CDR regions, e.g., wherein certain individual residues are mutated to the corresponding residue of a particular germline sequence while certain other residues that differ from the original germline sequence are maintained or are mutated to the corresponding residue of a different germline sequence. Once obtained, antibodies and antigen-binding fragments that contain one or more germline mutations can be easily tested for one or more desired property such as, improved binding specificity, increased binding affinity, improved or enhanced antagonistic or agonistic biological properties (as the case may be), reduced immunogenicity, etc. Antibodies and antigen-binding fragments obtained in this general manner are encompassed within the present invention.

[0116] The present invention also includes anti-PSMA or anti-PSMA/anti-CD3 antibodies comprising variants of any of the HCVR, LCVR, and/or CDR amino acid sequences disclosed herein having one or more conservative substitutions. For example, the present invention includes anti-PSMA or anti-PSMA/anti-CD3 antibodies having HCVR, LCVR, and/or CDR amino acid sequences with, e.g., 10 or fewer, 8 or fewer, 6 or fewer, 4 or fewer, etc. conservative amino acid substitutions relative to any of the HCVR, LCVR, and/or CDR amino acid sequences set forth in Table 1 herein or as described in Tables 12, 14, 15, 18, and 20 herein.

[0117] The term “epitope” refers to an antigenic determinant that interacts with a specific antigen binding site in the variable region of an antibody molecule known as a paratope. A single antigen may have more than one epitope. Thus, different antibodies may bind to different areas on an antigen and may have different biological effects. Epitopes may be either conformational or linear. A conformational epitope is produced by spatially juxtaposed amino acids from different segments of the linear polypeptide chain. A linear epitope is one produced by adjacent amino acid residues in a polypeptide chain. In certain circumstance, an epitope may include moieties of saccharides, phosphoryl groups, or sulfonyl groups on the antigen.

[0118] The term “substantial identity” or “substantially identical,” when referring to a nucleic acid or fragment thereof, indicates that, when optimally aligned with appropriate nucleotide insertions or deletions with another nucleic acid (or its complementary strand), there is nucleotide sequence identity in at least about 95%, and more preferably at least about 96%, 97%, 98% or 99% of the nucleotide bases, as measured by any well-known algorithm of sequence identity, such as FASTA, BLAST or Gap, as discussed below. A nucleic acid molecule having substantial identity to a reference nucleic acid molecule may, in certain instances, encode a polypeptide having the same or substantially similar amino acid sequence as the polypeptide encoded by the reference nucleic acid molecule.

[0119] As applied to polypeptides, the term “substantial similarity” or “substantially similar” means that two peptide sequences, when optimally aligned, such as by the programs GAP or BESTFIT using default gap weights, share at least 95% sequence identity, even more preferably at least 98% or 99% sequence identity. Preferably, residue positions which are not identical differ by conservative amino acid substitutions. A “conservative amino acid substitution” is one in which an amino acid residue is substituted by another amino acid residue having a side chain (R group) with similar chemical properties (e.g., charge or hydrophobicity). In general, a conservative amino acid substitution will not substantially change the functional properties of a protein. In cases where two or more amino acid sequences differ from each other by conservative substitutions, the percent sequence identity or degree of similarity may be adjusted upwards to correct for the conservative nature of the substitution. Means for making this adjustment are well-known to those of skill in the art. See, e.g., Pearson (1994) Methods Mol. Biol. 24:307-331, herein incorporated by reference. Examples of groups of amino acids that have side chains with similar chemical properties include (1) aliphatic side chains: glycine, alanine, valine, leucine and isoleucine; (2) aliphatic-hydroxyl side chains: serine and threonine; (3) amide-containing side chains: asparagine and glutamine; (4) aromatic side chains: phenylalanine, tyrosine, and tryptophan; (5) basic side chains: lysine, arginine, and histidine; (6) acidic side chains: aspartate and glutamate, and (7) sulfur-containing side chains are cysteine and methionine. Preferred conservative amino acids substitution groups are: valine-leucine-isoleucine, phenylalanine-tyrosine, lysine-arginine, alanine-valine, glutamate-aspartate, and asparagine-glutamine. Alternatively, a conservative replacement is any change having a positive value in the PAM250 log-likelihood matrix disclosed in Gonnet et al. (1992) Science 256:1443-1445, herein incorporated by reference. A “moderately conservative” replacement is any change having a nonnegative value in the PAM250 log-likelihood matrix.

[0120] Sequence similarity for polypeptides, which is also referred to as sequence identity, is typically measured using sequence analysis software. Protein analysis software matches similar sequences using measures of similarity assigned to various substitutions, deletions and other modifications, including conservative amino acid substitutions. For instance, GCG software contains programs such as Gap and Bestfit which can be used with default parameters to determine sequence homology or sequence identity between closely related polypeptides, such as homologous polypeptides from different species of organisms or between a wild type protein and a mutein thereof. See, e.g., GCG Version 6.1. Polypeptide sequences also can be compared using FASTA using default or recommended parameters, a program in GCG Version 6.1. FASTA (e.g., FASTA2 and FASTA3) provides alignments and percent sequence identity of the regions of the best overlap between the query and search sequences (Pearson (2000) supra). Another preferred algorithm when comparing a sequence of the invention to a database containing a large number of sequences from different organisms is the computer program BLAST, especially BLASTP or TBLASTN, using default parameters. See, e.g., Altschul et al. (1990) J. Mol. Biol. 215:403-410 and Altschul et al. (1997) Nucleic Acids Res. 25:3389-402, each herein incorporated by reference.

### Germline Mutations

[0121] The anti-CD3 antibodies disclosed herein comprise one or more amino acid substitutions, insertions and/or deletions in the framework and/or CDR regions of the heavy chain variable domains as compared to the corresponding germline sequences from which the antibodies were derived.

[0122] The present invention also includes antibodies, and antigen-binding fragments thereof, which are derived from any of the amino acid sequences disclosed herein, wherein one or more amino acids within one or more framework and/or CDR regions are mutated to the corresponding residue(s) of the germline sequence from which the antibody was derived, or to the corresponding residue(s) of another human germline sequence, or to a conservative amino acid substitution of the corresponding germline residue(s) (such sequence changes are referred to herein collectively as “germline mutations”), and having weak or no detectable binding to a CD3 antigen. Several such exemplary antibodies that recognize CD3 are described in Tables 12 and 18 herein.

[0123] Furthermore, the antibodies of the present invention may contain any combination of two or more germline mutations within the framework and/or CDR regions, e.g., wherein certain individual residues are mutated to the corresponding residue of a particular germline sequence while certain other residues that differ from the original germline sequence are maintained or are mutated to the corresponding residue of a different germline sequence. Once obtained, antibodies and antigen-binding fragments that contain one or more germline mutations can be tested for one or more desired properties such as, improved binding specificity, weak or reduced binding affinity, improved or enhanced pharmacokinetic properties, reduced immunogenicity, etc. Antibodies and antigen-binding fragments obtained in this general manner given the guidance of the present disclosure are encompassed within the present invention.

[0124] The present invention also includes anti-CD3 antibodies comprising variants of any of the HCVR, LCVR, and/or CDR amino acid sequences disclosed herein having one or more conservative substitutions. For example, the present invention includes anti-CD3 antibodies having HCVR, LCVR, and/or CDR amino acid sequences with, e.g., 10 or fewer, 8 or fewer, 6 or fewer, 4 or fewer, etc. conservative amino acid substitutions relative to any of the HCVR, LCVR, and/or CDR amino acid sequences set forth in Tables 12, 14, 15, 18, and 20 herein. The antibodies and bispecific antigen-binding molecules of the present invention comprise one or more amino acid substitutions, insertions and/or deletions in the framework and/or CDR regions of the heavy and light chain variable domains as compared to the corresponding germline sequences from which the individual antigen-binding domains were derived, while maintaining or improving the desired weak-to-no detectable binding to CD3 antigen. A “conservative amino acid substitution” is one in which an amino acid residue is substituted by another amino acid residue having a side chain (R group) with similar chemical properties (e.g., charge or hydrophobicity). In general, a conservative amino acid substitution will not substantially change the functional properties of a protein, i.e. the amino acid substitution maintains or improves the desired weak to no detectable binding affinity in the case of anti-CD3 binding molecules. Examples of groups of amino acids that have side chains with similar chemical properties include (1) aliphatic side chains: glycine, alanine, valine, leucine and isoleucine; (2) aliphatic-hydroxyl side chains: serine and threonine; (3) amide-containing side chains: asparagine and glutamine; (4) aromatic side chains: phenylalanine, tyrosine, and tryptophan; (5) basic side chains: lysine, arginine, and histidine; (6) acidic side chains: aspartate and glutamate, and (7) sulfur-containing side chains are cysteine and methionine. Preferred conservative amino acids substitution groups are: valine-leucine-isoleucine, phenylalanine-tyrosine, lysine-arginine, alanine-valine, glutamate-aspartate, and asparagine-glutamine. Alternatively, a conservative replacement is any change having a positive value in the PAM250 log-likelihood matrix disclosed in Gonnet et al. (1992) Science 256:1443-1445. A “moderately conservative” replacement is any change having a nonnegative value in the PAM250 log-likelihood matrix.

[0125] The present invention also includes antigen-binding molecules comprising an antigen-binding domain with an HCVR and/or CDR amino acid sequence that is substantially identical to any of the HCVR and/or CDR amino acid sequences disclosed herein, while maintaining or improving the desired weak affinity to CD3 antigen. The term “substantial identity” or “substantially identical,” when referring to an amino acid sequence means that two amino acid sequences, when optimally aligned, such as by the programs GAP or BESTFIT using default gap weights, share at least 95% sequence identity, even more preferably at least 98% or 99% sequence identity. Preferably, residue positions which are not identical differ by conservative amino acid substitutions. In cases where two or more amino acid sequences differ from each other by conservative substitutions, the percent sequence identity or degree of similarity may be adjusted upwards to correct for the conservative nature of the substitution. Means for making this adjustment are well-known to those of skill in the art. See, e.g., Pearson (1994) Methods Mol. Biol. 24:307-331.

[0126] Sequence similarity for polypeptides, which is also referred to as sequence identity, is typically measured using sequence analysis software. Protein analysis software matches similar sequences using measures of similarity assigned to various substitutions, deletions and other modifications, including conservative amino acid substitutions. For instance, GCG software contains programs such as Gap and Bestfit which can be used with default parameters to determine sequence homology or sequence identity between closely related polypeptides, such as homologous polypeptides from different species of organisms or between a wild type protein and a mutein thereof. See, e.g., GCG Version 6.1. Polypeptide sequences also can be compared using FASTA using default or recommended parameters, a program in GCG Version 6.1. FASTA (e.g., FASTA2 and FASTA3) provides alignments and percent sequence identity of the regions of the best overlap between the query and search sequences (Pearson (2000) supra). Another preferred algorithm when comparing a sequence of the invention to a database containing a large number of sequences from different organisms is the computer program BLAST, especially BLASTP or TBLASTN, using default parameters. See, e.g., Altschul et al. (1990) J. Mol. Biol. 215:403-410 and Altschul et al. (1997) Nucleic Acids Res. 25:3389-402.

[0127] Once obtained, antigen-binding domains that contain one or more germline mutations were tested for decreased binding affinity utilizing one or more in vitro assays. Although antibodies that recognize a particular antigen are typically screened for their purpose by testing for high (i.e. strong) binding affinity to the antigen, the antibodies of the present invention exhibit weak binding or no detectable binding. Bispecific antigen-binding molecules comprising one or more antigen-binding domains obtained in this general manner are also encompassed within the present invention and were found to be advantageous as avidity-driven tumor therapies.

[0128] Unexpected benefits, for example, improved pharmacokinetic properties and low toxicity to the patient may be realized from the methods described herein.

### Binding Properties of the Antibodies

[0129] As used herein, the term “binding” in the context of the binding of an antibody, immunoglobulin, antibody-binding fragment, or Fc-containing protein to either, e.g., a predetermined antigen, such as a cell surface protein or fragment thereof, typically refers to an interaction or association between a minimum of two entities or molecular structures, such as an antibody-antigen interaction.

[0130] For instance, binding affinity typically corresponds to a K_{D} value of about 10⁻⁷ M or less, such as about 10⁻⁸ M or less, such as about 10⁻⁹ M or less when determined by, for instance, surface plasmon resonance (SPR) technology in a BIAcore™ 3000 instrument using the antigen as the ligand and the antibody, Ig, antibody-binding fragment, or Fc-containing protein as the analyte (or antiligand). Cell-based binding strategies, such as fluorescent-activated cell sorting (FACS) binding assays, are also routinely used, and FACS data correlates well with other methods such as radioligand competition binding and SPR (Benedict, C A, J Immunol Methods. 1997, 201(2):223-31; Geuijen, C A, et al. J Immunol Methods. 2005, 302(1-2):68-77).

[0131] Accordingly, the antibody or antigen-binding protein of the invention binds to the predetermined antigen or cell surface molecule (receptor) having an affinity corresponding to a K_{D} value that is at least ten-fold lower than its affinity for binding to a non-specific antigen (e.g., BSA, casein). According to the present invention, the affinity of an antibody corresponding to a K_{D} value that is equal to or less than ten-fold lower than a non-specific antigen may be considered non-detectable binding, however such an antibody may be paired with a second antigen binding arm for the production of a bispecific antibody of the invention.

[0132] The term “K_{D}” (M) refers to the dissociation equilibrium constant of a particular antibody-antigen interaction, or the dissociation equilibrium constant of an antibody or antibody-binding fragment binding to an antigen. There is an inverse relationship between K_{D} and binding affinity, therefore the smaller the K_{D} value, the higher, i.e. stronger, the affinity. Thus, the terms “higher affinity” or “stronger affinity” relate to a higher ability to form an interaction and therefore a smaller K_{D} value, and conversely the terms “lower affinity” or “weaker affinity” relate to a lower ability to form an interaction and therefore a larger K_{D} value. In some circumstances, a higher binding affinity (or K_{D}) of a particular molecule (e.g. antibody) to its interactive partner molecule (e.g. antigen X) compared to the binding affinity of the molecule (e.g. antibody) to another interactive partner molecule (e.g. antigen Y) may be expressed as a binding ratio determined by dividing the larger K_{D} value (lower, or weaker, affinity) by the smaller K_{D} (higher, or stronger, affinity), for example expressed as 5-fold or 10-fold greater binding affinity, as the case may be.

[0133] The term “k_{d}” (sec−1 or 1/s) refers to the dissociation rate constant of a particular antibody-antigen interaction, or the dissociation rate constant of an antibody or antibody-binding fragment. Said value is also referred to as the k_{off} value.

[0134] The term “kₐ” (M−1×sec−1 or 1/M) refers to the association rate constant of a particular antibody-antigen interaction, or the association rate constant of an antibody or antibody-binding fragment.

[0135] The term “K_{A}” (M−1 or 1/M) refers to the association equilibrium constant of a particular antibody-antigen interaction, or the association equilibrium constant of an antibody or antibody-binding fragment. The association equilibrium constant is obtained by dividing the kₐ by the k_{d}.

[0136] The term “EC50” or “EC₅₀” refers to the half maximal effective concentration, which includes the concentration of an antibody which induces a response halfway between the baseline and maximum after a specified exposure time. The EC₅₀ essentially represents the concentration of an antibody where 50% of its maximal effect is observed. In certain embodiments, the EC₅₀ value equals the concentration of an antibody of the invention that gives half-maximal binding to cells expressing CD3 or tumor-associated antigen, as determined by e.g. a FACS binding assay. Thus, reduced or weaker binding is observed with an increased EC₅₀, or half maximal effective concentration value.

[0137] In one embodiment, decreased binding can be defined as an increased EC₅₀ antibody concentration which enables binding to the half-maximal amount of target cells.

[0138] In another embodiment, the EC₅₀ value represents the concentration of an antibody of the invention that elicits half-maximal depletion of target cells by T cell cytotoxic activity. Thus, increased cytotoxic activity (e.g. T cell-mediated tumor cell killing) is observed with a decreased EC₅₀, or half maximal effective concentration value.

### Bispecific Antigen-Binding Molecules

[0139] The antibodies of the present invention may be monospecific, bi-specific, or multispecific. Multispecific antibodies may be specific for different epitopes of one target polypeptide or may contain antigen-binding domains specific for more than one target polypeptide. See, e.g., Tutt et al., 1991, J. Immunol. 147:60-69; Kufer et al., 2004, Trends Biotechnol. 22:238-244. The anti-PSMA monospecific antibodies or anti-PSMA/anti-CD3 bispecific antibodies of the present invention can be linked to or co-expressed with another functional molecule, e.g., another peptide or protein. For example, an antibody or fragment thereof can be functionally linked (e.g., by chemical coupling, genetic fusion, noncovalent association or otherwise) to one or more other molecular entities, such as another antibody or antibody fragment to produce a bi-specific or a multispecific antibody with a second or additional binding specificity.

[0140] Use of the expression “anti-CD3 antibody” or “anti-PSMA antibody” herein is intended to include both monospecific anti-CD3 or anti-PSMA antibodies as well as bispecific antibodies comprising a CD3-binding arm and a PSMA-binding arm. Thus, the present invention includes bispecific antibodies wherein one arm of an immunoglobulin binds human CD3, and the other arm of the immunoglobulin is specific for human PSMA. The CD3-binding arm can comprise any of the HCVR/LCVR or CDR amino acid sequences as set forth in Tables 12, 14, 15, 18, and 20 herein.

[0141] In certain embodiments, the CD3-binding arm binds to human CD3 and induces human T cell activation. In certain embodiments, the CD3-binding arm binds weakly to human CD3 and induces human T cell activation. In other embodiments, the CD3-binding arm binds weakly to human CD3 and induces tumor-associated antigen-expressing cell killing in the context of a bispecific or multispecific antibody. In other embodiments, the CD3-binding arm binds or associated weakly with human and cynomolgus (monkey) CD3, yet the binding interaction is not detectable by in vitro assays known in the art. The PSMA-binding arm can comprise any of the HCVR/LCVR or CDR amino acid sequences as set forth in Table 1 herein.

[0142] According to certain exemplary embodiments, the present invention includes bispecific antigen-binding molecules that specifically bind CD3 and PSMA. Such molecules may be referred to herein as, e.g., “anti-CD3/anti-PSMA,” or “anti-CD3×PSMA” or “CD3×PSMA” bispecific molecules, or other similar terminology (e.g., anti-PSMA/anti-CD3).

[0143] The term “PSMA,” as used herein, refers to the human PSMA protein unless specified as being from a non-human species (e.g., “mouse PSMA,” “monkey PSMA,” etc.). The human PSMA protein has the amino acid sequence shown in SEQ ID NO:1651.

[0144] The aforementioned bispecific antigen-binding molecules that specifically bind CD3 and PSMA may comprise an anti-CD3 antigen-binding molecule which binds to CD3 with a weak binding affinity such as exhibiting a K_{D} of greater than about 40 nM, as measured by an in vitro affinity binding assay.

[0145] As used herein, the expression “antigen-binding molecule” means a protein, polypeptide or molecular complex comprising or consisting of at least one complementarity determining region (CDR) that alone, or in combination with one or more additional CDRs and/or framework regions (FRs), specifically binds to a particular antigen. In certain embodiments, an antigen-binding molecule is an antibody or a fragment of an antibody, as those terms are defined elsewhere herein.

[0146] As used herein, the expression “bispecific antigen-binding molecule” means a protein, polypeptide or molecular complex comprising at least a first antigen-binding domain and a second antigen-binding domain. Each antigen-binding domain within the bispecific antigen-binding molecule comprises at least one CDR that alone, or in combination with one or more additional CDRs and/or FRs, specifically binds to a particular antigen. In the context of the present invention, the first antigen-binding domain specifically binds a first antigen (e.g., CD3), and the second antigen-binding domain specifically binds a second, distinct antigen (e.g., PSMA).

[0147] In certain exemplary embodiments of the present invention, the bispecific antigen-binding molecule is a bispecific antibody. Each antigen-binding domain of a bispecific antibody comprises a heavy chain variable domain (HCVR) and a light chain variable domain (LCVR). In the context of a bispecific antigen-binding molecule comprising a first and a second antigen-binding domain (e.g., a bispecific antibody), the CDRs of the first antigen-binding domain may be designated with the prefix “A1” and the CDRs of the second antigen-binding domain may be designated with the prefix “A2”. Thus, the CDRs of the first antigen-binding domain may be referred to herein as A1-HCDR1, A1-HCDR2, and A1-HCDR3; and the CDRs of the second antigen-binding domain may be referred to herein as A2-HCDR1, A2-HCDR2, and A2-HCDR3.

[0148] The first antigen-binding domain and the second antigen-binding domain may be directly or indirectly connected to one another to form a bispecific antigen-binding molecule of the present invention. Alternatively, the first antigen-binding domain and the second antigen-binding domain may each be connected to a separate multimerizing domain. The association of one multimerizing domain with another multimerizing domain facilitates the association between the two antigen-binding domains, thereby forming a bispecific antigen-binding molecule. As used herein, a “multimerizing domain” is any macromolecule, protein, polypeptide, peptide, or amino acid that has the ability to associate with a second multimerizing domain of the same or similar structure or constitution. For example, a multimerizing domain may be a polypeptide comprising an immunoglobulin C_{H}3 domain. A non-limiting example of a multimerizing component is an Fc portion of an immunoglobulin (comprising a C_{H}2-C_{H}3 domain), e.g., an Fc domain of an IgG selected from the isotypes IgG1, IgG2, IgG3, and IgG4, as well as any allotype within each isotype group.

[0149] Bispecific antigen-binding molecules of the present invention will typically comprise two multimerizing domains, e.g., two Fc domains that are each individually part of a separate antibody heavy chain. The first and second multimerizing domains may be of the same IgG isotype such as, e.g., IgG1/IgG1, IgG2/IgG2, IgG4/IgG4. Alternatively, the first and second multimerizing domains may be of different IgG isotypes such as, e.g., IgG1/IgG2, IgG1/IgG4, IgG2/IgG4, etc.

[0150] In certain embodiments, the multimerizing domain is an Fc fragment or an amino acid sequence of from 1 to about 200 amino acids in length containing at least one cysteine residue. In other embodiments, the multimerizing domain is a cysteine residue, or a short cysteine-containing peptide. Other multimerizing domains include peptides or polypeptides comprising or consisting of a leucine zipper, a helix-loop motif, or a coiled-coil motif.

[0151] Any bispecific antibody format or technology may be used to make the bispecific antigen-binding molecules of the present invention. For example, an antibody or fragment thereof having a first antigen binding specificity can be functionally linked (e.g., by chemical coupling, genetic fusion, noncovalent association or otherwise) to one or more other molecular entities, such as another antibody or antibody fragment having a second antigen-binding specificity to produce a bispecific antigen-binding molecule. Specific exemplary bispecific formats that can be used in the context of the present invention include, without limitation, e.g., scFv-based or diabody bispecific formats, IgG-scFv fusions, dual variable domain (DVD)-Ig, Quadroma, knobs-into-holes, common light chain (e.g., common light chain with knobs-into-holes, etc.), CrossMab, CrossFab, (SEED) body, leucine zipper, Duobody, IgG1/IgG2, dual acting Fab (DAF)-IgG, and Mab2 bispecific formats (see, e.g., Klein et al. 2012, mAbs 4:6, 1-11, and references cited therein, for a review of the foregoing formats).

[0152] In the context of bispecific antigen-binding molecules of the present invention, the multimerizing domains, e.g., Fc domains, may comprise one or more amino acid changes (e.g., insertions, deletions or substitutions) as compared to the wild-type, naturally occurring version of the Fc domain. For example, the invention includes bispecific antigen-binding molecules comprising one or more modifications in the Fc domain that results in a modified Fc domain having a modified binding interaction (e.g., enhanced or diminished) between Fc and FcRn. In one embodiment, the bispecific antigen-binding molecule comprises a modification in a C_{H}2 or a C_{H}3 region, wherein the modification increases the affinity of the Fc domain to FcRn in an acidic environment (e.g., in an endosome where pH ranges from about 5.5 to about 6.0). Non-limiting examples of such Fc modifications include, e.g., a modification at position 250 (e.g., E or Q); 250 and 428 (e.g., L or F); 252 (e.g., L/Y/F/W or T), 254 (e.g., S or T), and 256 (e.g., S/R/Q/E/D or T); or a modification at position 428 and/or 433 (e.g., L/R/S/P/Q or K) and/or 434 (e.g., H/F or Y); or a modification at position 250 and/or 428; or a modification at position 307 or 308 (e.g., 308F, V308F), and 434. In one embodiment, the modification comprises a 428L (e.g., M428L) and 434S (e.g., N434S) modification; a 428L, 2591 (e.g., V259I), and 308F (e.g., V308F) modification; a 433K (e.g., H433K) and a 434 (e.g., 434Y) modification; a 252, 254, and 256 (e.g., 252Y, 254T, and 256E) modification; a 250Q and 428L modification (e.g., T250Q and M428L); and a 307 and/or 308 modification (e.g., 308F or 308P).

[0153] The present invention also includes bispecific antigen-binding molecules comprising a first C_{H}3 domain and a second Ig C_{H}3 domain, wherein the first and second Ig C_{H}3 domains differ from one another by at least one amino acid, and wherein at least one amino acid difference reduces binding of the bispecific antibody to Protein A as compared to a bi-specific antibody lacking the amino acid difference. In one embodiment, the first Ig C_{H}3 domain binds Protein A and the second Ig C_{H}3 domain contains a mutation that reduces or abolishes Protein A binding such as an H95R modification (by IMGT exon numbering; H435R by EU numbering). The second C_{H}3 may further comprise a Y96F modification (by IMGT; Y436F by EU). See, for example, U.S. Pat. No. 8,586,713. Further modifications that may be found within the second C_{H}3 include: D16E, L18M, N44S, K52N, V57M, and V82I (by IMGT; D356E, L358M, N384S, K392N, V397M, and V422I by EU) in the case of IgG1 antibodies; N44S, K52N, and V82I (IMGT; N384S, K392N, and V422I by EU) in the case of IgG2 antibodies; and Q15R, N44S, K52N, V57M, R69K, E79Q, and V82I (by IMGT; Q355R, N384S, K392N, V397M, R409K, E419Q, and V422I by EU) in the case of IgG4 antibodies.

[0154] In certain embodiments, the Fc domain may be chimeric, combining Fc sequences derived from more than one immunoglobulin isotype. For example, a chimeric Fc domain can comprise part or all of a C_{H}2 sequence derived from a human IgG1, human IgG2 or human IgG4 C_{H}2 region, and part or all of a C_{H}3 sequence derived from a human IgG1, human IgG2 or human IgG4. A chimeric Fc domain can also contain a chimeric hinge region. For example, a chimeric hinge may comprise an “upper hinge” sequence, derived from a human IgG1, a human IgG2 or a human IgG4 hinge region, combined with a “lower hinge” sequence, derived from a human IgG1, a human IgG2 or a human IgG4 hinge region. A particular example of a chimeric Fc domain that can be included in any of the antigen-binding molecules set forth herein comprises, from N- to C-terminus: [IgG4 C_{H}1]−[IgG4 upper hinge]−[IgG2 lower hinge]−[IgG4 CH2]−[IgG4 CH3]. Another example of a chimeric Fc domain that can be included in any of the antigen-binding molecules set forth herein comprises, from N- to C-terminus: [IgG1 CH1]−[IgG1 upper hinge]−[IgG2 lower hinge]−[IgG4 CH2]−[IgG1 CH3]. These and other examples of chimeric Fc domains that can be included in any of the antigen-binding molecules of the present invention are described in US Publication 2014/0243504, published Aug. 28, 2014, which is herein incorporated in its entirety. Chimeric Fc domains having these general structural arrangements, and variants thereof, can have altered Fc receptor binding, which in turn affects Fc effector function.

[0155] In certain embodiments, the invention provides an antibody heavy chain wherein the heavy chain constant region (CH) region comprises an amino acid sequence at least 95%, at least 96%, at least 97%, at least 98%, at least 99% identical to any one of SEQ ID NO: 1663, SEQ ID NO: 1664, SEQ ID NO: 1665, SEQ ID NO: 1666, SEQ ID NO: 1667, SEQ ID NO: 1668, SEQ ID NO: 1669, SEQ ID NO: 1670 SEQ ID NO: 1671 or SEQ ID NO: 1672. In some embodiments, the heavy chain constant region (CH) region comprises an amino acid sequence selected from the group consisting of SEQ ID NO: 1663, SEQ ID NO: 1664, SEQ ID NO: 1665, SEQ ID NO: 1666, SEQ ID NO: 1667, SEQ ID NO: 1668, SEQ ID NO: 1669, SEQ ID NO: 1670, SEQ ID NO: 1671 and SEQ ID NO: 1672.

[0156] In other embodiments, the invention provides an antibody heavy chain wherein the Fc domain comprises an amino acid sequence at least 95%, at least 96%, at least 97%, at least 98%, at least 99% identical to any one of SEQ ID NO: 1673, SEQ ID NO: 1674, SEQ ID NO: 1675, SEQ ID NO: 1676, SEQ ID NO: 1677, SEQ ID NO: 1678, SEQ ID NO: 1679, SEQ ID NO: 1680, SEQ ID NO: 1681 or SEQ ID NO: 1682. In some embodiments, the Fc domain comprises an amino acid sequence selected form the group consisting of SEQ ID NO: 1673, SEQ ID NO: 1674, SEQ ID NO: 1675, SEQ ID NO: 1676, SEQ ID NO: 1677, SEQ ID NO: 1678, SEQ ID NO: 1679, SEQ ID NO: 1680, SEQ ID NO: 1681 and SEQ ID NO: 1682.

### Sequence Variants

[0157] The antibodies and bispecific antigen-binding molecules of the present invention may comprise one or more amino acid substitutions, insertions and/or deletions in the framework and/or CDR regions of the heavy and light chain variable domains as compared to the corresponding germline sequences from which the individual antigen-binding domains were derived. Such mutations can be readily ascertained by comparing the amino acid sequences disclosed herein to germline sequences available from, for example, public antibody sequence databases. The antigen-binding molecules of the present invention may comprise antigen-binding domains which are derived from any of the exemplary amino acid sequences disclosed herein, wherein one or more amino acids within one or more framework and/or CDR regions are mutated to the corresponding residue(s) of the germline sequence from which the antibody was derived, or to the corresponding residue(s) of another human germline sequence, or to a conservative amino acid substitution of the corresponding germline residue(s) (such sequence changes are referred to herein collectively as “germline mutations”). A person of ordinary skill in the art, starting with the heavy and light chain variable region sequences disclosed herein, can easily produce numerous antibodies and antigen-binding fragments which comprise one or more individual germline mutations or combinations thereof. In certain embodiments, all of the framework and/or CDR residues within the V_{H} and/or V_{L} domains are mutated back to the residues found in the original germline sequence from which the antigen-binding domain was originally derived. In other embodiments, only certain residues are mutated back to the original germline sequence, e.g., only the mutated residues found within the first 8 amino acids of FR1 or within the last 8 amino acids of FR4, or only the mutated residues found within CDR1, CDR2 or CDR3. In other embodiments, one or more of the framework and/or CDR residue(s) are mutated to the corresponding residue(s) of a different germline sequence (i.e., a germline sequence that is different from the germline sequence from which the antigen-binding domain was originally derived). Furthermore, the antigen-binding domains may contain any combination of two or more germline mutations within the framework and/or CDR regions, e.g., wherein certain individual residues are mutated to the corresponding residue of a particular germline sequence while certain other residues that differ from the original germline sequence are maintained or are mutated to the corresponding residue of a different germline sequence. Once obtained, antigen-binding domains that contain one or more germline mutations can be easily tested for one or more desired property such as, improved binding specificity, increased binding affinity, improved or enhanced antagonistic or agonistic biological properties (as the case may be), reduced immunogenicity, etc. Bispecific antigen-binding molecules comprising one or more antigen-binding domains obtained in this general manner are encompassed within the present invention.

[0158] The present invention also includes antigen-binding molecules wherein one or both antigen-binding domains comprise variants of any of the HCVR, LCVR, and/or CDR amino acid sequences disclosed herein having one or more conservative substitutions. For example, the present invention includes antigen-binding molecules comprising an antigen-binding domain having HCVR, LCVR, and/or CDR amino acid sequences with, e.g., 10 or fewer, 8 or fewer, 6 or fewer, 4 or fewer, etc. conservative amino acid substitutions relative to any of the HCVR, LCVR, and/or CDR amino acid sequences disclosed herein. A “conservative amino acid substitution” is one in which an amino acid residue is substituted by another amino acid residue having a side chain (R group) with similar chemical properties (e.g., charge or hydrophobicity). In general, a conservative amino acid substitution will not substantially change the functional properties of a protein. Examples of groups of amino acids that have side chains with similar chemical properties include (1) aliphatic side chains: glycine, alanine, valine, leucine and isoleucine; (2) aliphatic-hydroxyl side chains: serine and threonine; (3) amide-containing side chains: asparagine and glutamine; (4) aromatic side chains: phenylalanine, tyrosine, and tryptophan; (5) basic side chains: lysine, arginine, and histidine; (6) acidic side chains: aspartate and glutamate, and (7) sulfur-containing side chains are cysteine and methionine. Preferred conservative amino acids substitution groups are: valine-leucine-isoleucine, phenylalanine-tyrosine, lysine-arginine, alanine-valine, glutamate-aspartate, and asparagine-glutamine. Alternatively, a conservative replacement is any change having a positive value in the PAM250 log-likelihood matrix disclosed in Gonnet et al. (1992) Science 256:1443-1445, herein incorporated by reference. A “moderately conservative” replacement is any change having a nonnegative value in the PAM250 log-likelihood matrix.

[0159] The present invention also includes antigen-binding molecules comprising an antigen-binding domain with an HCVR, LCVR, and/or CDR amino acid sequence that is substantially identical to any of the HCVR, LCVR, and/or CDR amino acid sequences disclosed herein. The term “substantial identity” or “substantially identical,” when referring to an amino acid sequence means that two amino acid sequences, when optimally aligned, such as by the programs GAP or BESTFIT using default gap weights, share at least 95% sequence identity, even more preferably at least 98% or 99% sequence identity. Preferably, residue positions which are not identical differ by conservative amino acid substitutions. In cases where two or more amino acid sequences differ from each other by conservative substitutions, the percent sequence identity or degree of similarity may be adjusted upwards to correct for the conservative nature of the substitution. Means for making this adjustment are well-known to those of skill in the art. See, e.g., Pearson (1994) Methods Mol. Biol. 24:307-331, herein incorporated by reference.

[0160] Sequence similarity for polypeptides, which is also referred to as sequence identity, is typically measured using sequence analysis software. Protein analysis software matches similar sequences using measures of similarity assigned to various substitutions, deletions and other modifications, including conservative amino acid substitutions. For instance, GCG software contains programs such as Gap and Bestfit which can be used with default parameters to determine sequence homology or sequence identity between closely related polypeptides, such as homologous polypeptides from different species of organisms or between a wild type protein and a mutein thereof. See, e.g., GCG Version 6.1. Polypeptide sequences also can be compared using FASTA using default or recommended parameters, a program in GCG Version 6.1. FASTA (e.g., FASTA2 and FASTA3) provides alignments and percent sequence identity of the regions of the best overlap between the query and search sequences (Pearson (2000) supra). Another preferred algorithm when comparing a sequence of the invention to a database containing a large number of sequences from different organisms is the computer program BLAST, especially BLASTP or TBLASTN, using default parameters. See, e.g., Altschul et al. (1990) J. Mol. Biol. 215:403-410 and Altschul et al. (1997) Nucleic Acids Res. 25:3389-402, each herein incorporated by reference.

pH-Dependent Binding

[0161] The present invention includes anti-PSMA antibodies, and anti-CD3/anti-PSMA bispecific antigen-binding molecules, with pH-dependent binding characteristics. For example, an anti-PSMA antibody of the present invention may exhibit reduced binding to PSMA at acidic pH as compared to neutral pH. Alternatively, anti-PSMA antibodies of the invention may exhibit enhanced binding to PSMA at acidic pH as compared to neutral pH. The expression “acidic pH” includes pH values less than about 6.2, e.g., about 6.0, 5.95, 5.9, 5.85, 5.8, 5.75, 5.7, 5.65, 5.6, 5.55, 5.5, 5.45, 5.4, 5.35, 5.3, 5.25, 5.2, 5.15, 5.1, 5.05, 5.0, or less. As used herein, the expression “neutral pH” means a pH of about 7.0 to about 7.4. The expression “neutral pH” includes pH values of about 7.0, 7.05, 7.1, 7.15, 7.2, 7.25, 7.3, 7.35, and 7.4.

[0162] In certain instances, “reduced binding . . . at acidic pH as compared to neutral pH” is expressed in terms of a ratio of the K_{D} value of the antibody binding to its antigen at acidic pH to the K_{D} value of the antibody binding to its antigen at neutral pH (or vice versa). For example, an antibody or antigen-binding fragment thereof may be regarded as exhibiting “reduced binding to PSMA at acidic pH as compared to neutral pH” for purposes of the present invention if the antibody or antigen-binding fragment thereof exhibits an acidic/neutral K_{D} ratio of about 3.0 or greater. In certain exemplary embodiments, the acidic/neutral K_{D} ratio for an antibody or antigen-binding fragment of the present invention can be about 3.0, 3.5, 4.0, 4.5, 5.0, 5.5, 6.0, 6.5, 7.0, 7.5, 8.0, 8.5, 9.0, 9.5, 10.0, 10.5, 11.0, 11.5, 12.0, 12.5, 13.0, 13.5, 14.0, 14.5, 15.0, 20.0. 25.0, 30.0, 40.0, 50.0, 60.0, 70.0, 100.0 or greater.

[0163] Antibodies with pH-dependent binding characteristics may be obtained, e.g., by screening a population of antibodies for reduced (or enhanced) binding to a particular antigen at acidic pH as compared to neutral pH. Additionally, modifications of the antigen-binding domain at the amino acid level may yield antibodies with pH-dependent characteristics. For example, by substituting one or more amino acids of an antigen-binding domain (e.g., within a CDR) with a histidine residue, an antibody with reduced antigen-binding at acidic pH relative to neutral pH may be obtained.

### Antibodies Comprising Fc Variants

[0164] According to certain embodiments of the present invention, anti-PSMA antibodies, and anti-CD3/anti-PSMA bispecific antigen-binding molecules, are provided comprising an Fc domain comprising one or more mutations which enhance or diminish antibody binding to the FcRn receptor, e.g., at acidic pH as compared to neutral pH. For example, the present invention includes antibodies comprising a mutation in the C_{H}2 or a C_{H}3 region of the Fc domain, wherein the mutation(s) increases the affinity of the Fc domain to FcRn in an acidic environment (e.g., in an endosome where pH ranges from about 5.5 to about 6.0). Such mutations may result in an increase in serum half-life of the antibody when administered to an animal. Non-limiting examples of such Fc modifications include, e.g., a modification at position 250 (e.g., E or Q); 250 and 428 (e.g., L or F); 252 (e.g., L/Y/F/W or T), 254 (e.g., S or T), and 256 (e.g., S/R/Q/E/D or T); or a modification at position 428 and/or 433 (e.g., H/L/R/S/P/Q or K) and/or 434 (e.g., H/F or Y); or a modification at position 250 and/or 428; or a modification at position 307 or 308 (e.g., 308F, V308F), and 434. In one embodiment, the modification comprises a 428L (e.g., M428L) and 434S (e.g., N434S) modification; a 428L, 2591 (e.g., V259I), and 308F (e.g., V308F) modification; a 433K (e.g., H433K) and a 434 (e.g., 434Y) modification; a 252, 254, and 256 (e.g., 252Y, 254T, and 256E) modification; a 250Q and 428L modification (e.g., T250Q and M428L); and a 307 and/or 308 modification (e.g., 308F or 308P).

[0165] For example, the present invention includes anti-PSMA antibodies, and anti-CD3/anti-PSMA bispecific antigen-binding molecules, comprising an Fc domain comprising one or more pairs or groups of mutations selected from the group consisting of: 250Q and 248L (e.g., T250Q and M248L); 252Y, 254T and 256E (e.g., M252Y, S254T and T256E); 428L and 434S (e.g., M428L and N434S); and 433K and 434F (e.g., H433K and N434F). All possible combinations of the foregoing Fc domain mutations, and other mutations within the antibody variable domains disclosed herein, are contemplated within the scope of the present invention.

### Biological Characteristics of the Antibodies and Bispecific Antigen-Binding Molecules

[0166] The present invention includes antibodies and antigen-binding fragments thereof that bind human PSMA with high affinity (e.g., sub-nanomolar K_{D} values).

[0167] According to certain embodiments, the present invention includes antibodies and antigen-binding fragments of antibodies that bind human PSMA (e.g., at 37° C.) with a K_{D} of less than about 80 nM as measured by surface plasmon resonance, e.g., using an assay format as defined in Example 3 herein. In certain embodiments, the antibodies or antigen-binding fragments of the present invention bind PSMA with a K_{D} of less than about 5 nM, less than about 2 nM, less than about 1 nM, less than about 800 pM, less than about 600 pM, less than about 500 pM, less than about 400 pM, less than about 300 pM, less than about 200 pM, less than about 180 pM, less than about 160 pM, less than about 140 pM, less than about 120 pM, less than about 100 pM, less than about 80 pM, less than about 60 pM, less than about 40 pM, less than about 20 pM, or less than about 10 pM, as measured by surface plasmon resonance, e.g., using an assay format as defined in Example 3 herein (e.g., mAb-capture or antigen-capture format), or a substantially similar assay.

[0168] The present invention also includes antibodies and antigen-binding fragments thereof that bind PSMA with a dissociative half-life (t½) of greater than about 1 minute or greater than about 10 minutes as measured by surface plasmon resonance at 37° C., e.g., using an assay format as defined in Example 3 herein, or a substantially similar assay. In certain embodiments, the antibodies or antigen-binding fragments of the present invention bind PSMA with a t½ of greater than about 20 minutes, greater than about 30 minutes, greater than about 40 minutes, greater than about 50 minutes, greater than about 60 minutes, greater than about 70 minutes, greater than about 80 minutes, greater than about 90 minutes, greater than about 100 minutes, greater than about 200 minutes, greater than about 300 minutes, greater than about 400 minutes, greater than about 500 minutes, greater than about 600 minutes, greater than about 700 minutes, greater than about 800 minutes, greater than about 900 minutes, greater than about 1000 minutes, or greater than about 1100 minutes, as measured by surface plasmon resonance at 25° C. or 37° C., e.g., using an assay format as defined in Example 3 herein (e.g., mAb-capture or antigen-capture format), or a substantially similar assay. The present invention includes bispecific antigen-binding molecules (e.g., bispecific antibodies) which are capable of simultaneously binding to human CD3 and human PSMA. According to certain embodiments, the bispecific antigen-binding molecules of the invention specifically interact with cells that express CD3 and/or PSMA. The extent to which a bispecific antigen-binding molecule binds cells that express CD3 and/or PSMA can be assessed by fluorescence activated cell sorting (FACS), as illustrated in Example 5 herein. For example, the present invention includes bispecific antigen-binding molecules which specifically bind human T-cell lines which express CD3 (such cell lines do not express PSMA, e.g., Jurkat) and/or human lines which express PSMA (such cell lines do not express CD3, e.g., B16F10.9/hPSMA or 22RV1). The present invention includes bispecific antigen-binding molecules which bind any of the aforementioned cells and cell lines with an EC₅₀ value of about 80 nM, or less, as determined using a FACS assay as set forth in Example 5 or a substantially similar assay.

[0169] The present invention also includes anti-CD3/anti-PSMA bispecific antigen-binding molecules which bind to CD3-expressing human T-cells (e.g., Jurkat) and/or PSMA-expressing cells with an EC₅₀ value of between 1.0 pM and 1000 nM. In certain embodiments, the anti-CD3/anti-PSMA bispecific antigen-binding molecules bind to CD3-expressing human T-cells with an EC₅₀ value of between 1 nM and 60 nM. For example, the present invention includes anti-CD3/anti-PSMA bispecific antigen-binding molecules which bind to CD3-expressing human T-cells (e.g., Jurkat) and/or PSMA-expressing cells with an EC₅₀ value of about 1 pM. about 10 pM, about 100 pM, about 500 pM, about 1 nM, about 2 nM, about 5 nM, about 10 nM, about 20 nM, about 30 nM, about 40 nM, about 50 nM about 60 nM, about 70 nM, about 80 nM, about 90 nM, about 100 nM, about 200 nM, about 300 nM, about 500 nM, about 800 nM, about 1000 nM, or more.

[0170] The present invention also includes anti-CD3/anti-PSMA bispecific antigen-binding molecules which exhibit one or more characteristics selected from the group consisting of: (a) inhibiting tumor growth in immunocompromised mice bearing human prostate cancer xenografts; (b) inhibiting tumor growth in immunocompetent mice bearing human prostate cancer xenografts; (c) suppressing tumor growth of established tumors in immunocompromised mice bearing human prostate cancer xenografts; and (d) reducing tumor growth of established tumors in immunocompetent mice bearing human prostate cancer xenografts (see, e.g., Example 8).

[0171] The present invention includes antibodies and antigen-binding fragments thereof that bind human CD3 with high affinity. The present invention also includes antibodies and antigen-binding fragments thereof that bind human CD3 with medium or low affinity, depending on the therapeutic context and particular targeting properties that are desired. For example, in the context of a bispecific antigen-binding molecule, wherein one arm binds CD3 and another arm binds a target antigen (e.g., PSMA), it may be desirable for the target antigen-binding arm to bind the target antigen with high affinity while the anti-CD3 arm binds CD3 with only moderate or low affinity. In this manner, preferential targeting of the antigen-binding molecule to cells expressing the target antigen may be achieved while avoiding general/untargeted CD3 binding and the consequent adverse side effects associated therewith.

[0172] The present invention includes bispecific antigen-binding molecules (e.g., bispecific antibodies) which are capable of simultaneously binding to human CD3 and a human PSMA. The binding arm that interacts with cells that express CD3 may have weak to no detectable binding as measured in a suitable in vitro binding assay. The extent to which a bispecific antigen-binding molecule binds cells that express CD3 and/or PSMA can be assessed by fluorescence activated cell sorting (FACS), as illustrated in Example 5 herein.

[0173] For example, the present invention includes antibodies, antigen-binding fragments, and bispecific antibodies thereof which specifically bind human T-cell lines which express CD3 but do not express PSMA (e.g., Jurkat), primate T-cells (e.g., cynomolgus peripheral blood mononuclear cells [PBMCs]), and/or PSMA-expressing cells. The present invention includes bispecific antigen-binding molecules which bind any of the aforementioned T cells and T cell lines with an EC₅₀ value of from about 1.8×10⁻⁸ (18 nM) to about 2.1×10⁻⁷ (210 nM), or more (i.e. weaker affinity), or EC₅₀ is undetectable, as determined using a FACS binding assay as set forth in Example 5 or a substantially similar assay. In certain embodiments, the antibodies, antigen-binding fragments, and bispecific antibodies of the present invention bind CD3 with an EC₅₀ of greater than about 30 nM, greater than about 40 nM, greater than about 45 nM, greater than about 50 nM, greater than about 55 nM, greater than about 60 nM, greater than about 65 nM, greater than about 70 nM, greater than about 75 nM, at least 80 nM, greater than about 90 nM, greater than about 100 nM, greater than about 110 nM, at least 120 nM, greater than about 130 nM, greater than about 140 nM, greater than about 150 nM, at least 160 nM, greater than about 170 nM, greater than about 180 nM, greater than about 190 nM, greater than about 200 nM, greater than about 250 nM, greater than about 300 nM, greater than about 1 μM, greater than about 2 μM, or greater than about 3 UM, or no detectable affinity, as measured by FACS binding, e.g., using an assay format as defined in Example 5 herein, or a substantially similar assay.

[0174] The present invention also includes antibodies, antigen-binding fragments, and bispecific antibodies thereof which bind to PSMA-expressing cells and cell lines, with an EC₅₀ value of less than or equal to 5.6 nM (5.6×10⁻⁹), as determined using a FACS binding assay as set forth in Example 5 or a substantially similar assay.

[0175] The present invention includes antibodies, antigen-binding fragments, and bispecific antibodies thereof that bind human CD3 with weak (i.e. low) or even no detectable affinity. According to certain embodiments, the present invention includes antibodies and antigen-binding fragments of antibodies that bind human CD3 (e.g., at 37° C.) with a K_{D} of greater than about 11 nM as measured by surface plasmon resonance, e.g., using an assay format as defined in Example 6 herein. In certain embodiments, the antibodies or antigen-binding fragments of the present invention bind CD3 with a K_{D} of greater than about 15 nM, greater than about 20 nM, greater than about 25 nM, greater than about 30 nM, greater than about 35 nM, greater than about 40 nM, greater than about 45 nM, greater than about 50 nM, greater than about 55 nM, greater than about 60 nM, greater than about 65 nM, greater than about 70 nM, greater than about 75 nM, at least 80 nM, greater than about 90 nM, greater than about 100 nM, greater than about 110 nM, at least 120 nM, greater than about 130 nM, greater than about 140 nM, greater than about 150 nM, at least 160 nM, greater than about 170 nM, greater than about 180 nM, greater than about 190 nM, greater than about 200 nM, greater than about 250 nM, greater than about 300 nM, greater than about 1 μM, greater than about 2 μM, or greater than about 3 μM, or no detectable affinity, as measured by surface plasmon resonance, e.g., using an assay format as defined in Example 6 herein (e.g., mAb-capture or antigen-capture format), or a substantially similar assay.

[0176] The present invention includes antibodies, antigen-binding fragments, and bispecific antibodies thereof that bind monkey (i.e. cynomolgus) CD3 with weak (i.e. low) or even no detectable affinity. According to certain embodiments, the present invention includes antibodies, antigen-binding fragments, and bispecific antibodies thereof that bind human CD3 (e.g., at 37° C.) with a K_{D} of greater than about 10 nM as measured by surface plasmon resonance, e.g., using an assay format as defined in Example 6 herein. In certain embodiments, the antibodies or antigen-binding fragments of the present invention bind CD3 with a K_{D} of greater than about 15 nM, greater than about 20 nM, greater than about 25 nM, greater than about 30 nM, greater than about 35 nM, greater than about 40 nM, greater than about 45 nM, greater than about 50 nM, greater than about 55 nM, greater than about 60 nM, greater than about 65 nM, greater than about 70 nM, greater than about 75 nM, at least 80 nM, greater than about 90 nM, greater than about 100 nM, greater than about 110 nM, at least 120 nM, greater than about 130 nM, greater than about 140 nM, greater than about 150 nM, at least 160 nM, greater than about 170 nM, greater than about 180 nM, greater than about 190 nM, greater than about 200 nM, greater than about 250 nM, greater than about 300 nM, greater than about 1 μM, greater than about 2 μM, or greater than about 3 μM, or no detectable affinity, as measured by surface plasmon resonance, e.g., using an assay format as defined in Example 6 herein (e.g., mAb-capture or antigen-capture format), or a substantially similar assay.

[0177] The present invention includes antibodies, antigen-binding fragments, and bispecific antibodies thereof that bind human CD3 and induce T cell activation. For example, the present invention includes anti-CD3 antibodies that induce human T cell activation with an EC₅₀ value of less than about 113 pM, as measured by an in vitro T cell activation assay, e.g., using the assay format as defined in Example 7 herein [e.g., assessing the percent activated (CD69+) cells out of total T cells (CD2+) in the presence of anti-CD3 antibodies], or a substantially similar assay that assesses T cell in their activated state. In certain embodiments, the antibodies or antigen-binding fragments of the present invention induce human T cell activation [e.g., percent activated (CD69+) T cells] with an EC₅₀ value of less than about 100 pM, less than about 50 pM, less than about 20 pM, less than about 19 pM, less than about 18 pM, less than about 17 pM, less than about 16 pM, less than about 15 pM, less than about 14 pM, less than about 13 pM, less than about 12 pM, less than about 11 pM, less than about 10 pM, less than about 9 pM, less than about 8 pM, less than about 7 pM, less than about 6 pM, less than about 5 pM, less than about 4 pM, less than about 3 pM, less than about 2 pM, or less than about 1 pM, as measured by an in vitro T cell activation assay, e.g., using the assay format as defined in Example 7 herein, or a substantially similar assay. Anti-CD3 antibodies that have weak or no detectable binding to CD3 have the ability to induce T cell activation with high potency (i.e. pM range), despite having weak or no detectable binding affinity to CD3, as exemplified in Example 7 herein.

[0178] The present invention also includes antibodies, antigen-binding fragments, and bispecific antibodies that bind human CD3 and induce T cell-mediated killing of tumor antigen-expressing cells. For example, the present invention includes anti-CD3 antibodies that induce T cell-mediated killing of tumor cells with an EC₅₀ of less than about 1.3 nM, as measured in an in vitro T cell-mediated tumor cell killing assay, e.g., using the assay format as defined in Example 7 herein (e.g., assessing the extent of PSMA-expressing cell killing by human PBMCs in the presence of anti-CD3 antibodies), or a substantially similar assay. In certain embodiments, the antibodies or antigen-binding fragments of the present invention induce T cell-mediated tumor cell killing (e.g., PBMC-mediated killing of C4-2, 22Rv1 and TRAMPC2_PSMA cells) with an EC₅₀ value of less than about 1 nM, less than about 400 pM, less than about 250 pM, less than about 100 pM, less than about 50 pM, less than about 40 pM, less than about 30 pM, less than about 20 pM, less than about 10 pM, less than about 9 pM, less than about 8 pM, less than about 7 pM, less than about 6 pM, less than about 5 pM, less than about 4 pM, less than about 3 pM, less than about 2 pM, or less than about 1 pM, as measured by an in vitro T cell-mediated tumor cell killing assay, e.g., using the assay format as defined in Example 7 herein, or a substantially similar assay. The present invention also includes antibodies, antigen-binding fragments, and bispecific antibodies that bind human and/or monkey (i.e. cynomolgus) CD3 with weak (i.e. low) or even no detectable affinity (i.e. do not bind or exhibit no detectable affinity) and induce T cell-mediated killing of tumor antigen-expressing cells.

[0179] The present invention also includes antibodies, antigen-binding fragments, and bispecific antibodies that bind CD3 with a dissociative half-life (t½) of less than about 10 minutes as measured by surface plasmon resonance at 25° C. or 37° C., e.g., using an assay format as defined in Example 6 herein, or a substantially similar assay. In certain embodiments, the antibodies or antigen-binding fragments of the present invention bind CD3 with a t½ of less than about 9 minutes, of less than about 8 minutes, of less than about 7 minutes, of less than about 6 minutes, of less than about 5 minutes, of less than about 4 minutes, of less than about 3 minutes, of less than about 2 minutes, of less than about 1.9 minutes, or less than about 1.8 minutes, or exhibit very weak or no detectable binding as measured by surface plasmon resonance at 25° C. or 37° C., e.g., using an assay format as defined in Example 6 herein (e.g., mAb-capture or antigen-capture format), or a substantially similar assay.

[0180] The anti-CD3/anti-PSMA bispecific antigen-binding molecules of the present invention may additionally exhibit one or more characteristics selected from the group consisting of: (a) inducing PBMC proliferation in vitro; (b) activating T-cells via inducing IFN-gamma release and CD25 up-regulation in human whole blood; and (c) inducing T-cell mediated cytotoxicity on anti-PSMA-resistant cell lines.

[0181] The present invention includes anti-CD3/anti-PSMA bispecific antigen-binding molecules which are capable of depleting tumor antigen-expressing cells in a subject (see, e.g., Example 8). For example, according to certain embodiments, anti-CD3/anti-PSMA bispecific antigen-binding molecules are provided, wherein a single administration of 1 ug, or 10 ug, or 100 μg of the bispecific antigen-binding molecule to a subject (e.g., at a dose of about 0.1 mg/kg, about 0.08 mg/kg, about 0.06 mg/kg about 0.04 mg/kg, about 0.04 mg/kg, about 0.02 mg/kg, about 0.01 mg/kg, or less) causes a reduction in the number of PSMA-expressing cells in the subject (e.g., tumor growth in the subject is suppressed or inhibited) below detectable levels. In certain embodiments, a single administration of the anti-CD3/anti-PSMA bispecific antigen-binding molecule at a dose of about 0.4 mg/kg causes a reduction in tumor growth in the subject below detectable levels by about day 7, about day 6, about day 5, about day 4, about day 3, about day 2, or about day 1 after administration of the bispecific antigen-binding molecule to the subject. According to certain embodiments, a single administration of an anti-CD3/anti-PSMA bispecific antigen-binding molecule of the invention, at a dose of at least about 0.01 mg/kg, causes the number of PSMA-expressing tumor cells to remain below detectable levels until at least about 7 days, 8 days, 9 days, 10 days, 11 days, 12 days, 13 days, 14 days, 15 days, 16 days, 17 days or more, following the administration. As used herein, the expression “below detectable levels” means that no tumor cells can be directly or indirectly detected growing subcutaneously in a subject using standard caliper measurement methods, e.g., as set forth in Example 8, herein.

[0182] The present invention also includes anti-CD3/anti-PSMA bispecific antigen-binding molecules which exhibit one or more characteristics selected from the group consisting of: (a) inhibiting tumor growth in immunocompromised mice bearing human prostate cancer xenografts; (b) inhibiting tumor growth in immunocompetent mice bearing human prostate cancer xenografts; (c) suppressing tumor growth of established tumors in immunocompromised mice bearing human prostate cancer xenografts; and (d) reducing tumor growth of established tumors in immunocompetent mice bearing human prostate cancer xenografts (see, e.g., Example 8). The present invention also includes anti-CD3/anti-PSMA bispecific antigen-binding molecules which exhibit one or more characteristics selected from the group consisting of: (a) induce transient dose-dependent increases in circulating cytokines, (b) induce transient increases in circulating T cells, and (c) do not deplete effector T cell cells (e.g. CD4+ T cells, CD8+ T cells, and regulatory T cells, i.e. Tregs).

### Epitope Mapping and Related Technologies

[0183] The epitope on CD3 and/or PSMA to which the antigen-binding molecules of the present invention bind may consist of a single contiguous sequence of 3 or more (e.g., 3, 4, 5, 6, 7, 8, 9, 10, 11, 12, 13, 14, 15, 16, 17, 18, 19, 20 or more) amino acids of a CD3 or PSMA protein. Alternatively, the epitope may consist of a plurality of non-contiguous amino acids (or amino acid sequences) of CD3 or PSMA. The antibodies of the invention may interact with amino acids contained within a single CD3 chain (e.g., CD3-epsilon, CD3-delta or CD3-gamma), or may interact with amino acids on two or more different CD3 chains. The term “epitope,” as used herein, refers to an antigenic determinant that interacts with a specific antigen binding site in the variable region of an antibody molecule known as a paratope. A single antigen may have more than one epitope. Thus, different antibodies may bind to different areas on an antigen and may have different biological effects. Epitopes may be either conformational or linear. A conformational epitope is produced by spatially juxtaposed amino acids from different segments of the linear polypeptide chain. A linear epitope is one produced by adjacent amino acid residues in a polypeptide chain. In certain circumstances, an epitope may include moieties of saccharides, phosphoryl groups, or sulfonyl groups on the antigen.

[0184] Various techniques known to persons of ordinary skill in the art can be used to determine whether an antigen-binding domain of an antibody “interacts with one or more amino acids” within a polypeptide or protein. Exemplary techniques include, e.g., routine cross-blocking assay such as that described Antibodies, Harlow and Lane (Cold Spring Harbor Press, Cold Spring Harb., NY), alanine scanning mutational analysis, peptide blots analysis (Reineke, 2004, Methods Mol Biol 248:443-463), and peptide cleavage analysis. In addition, methods such as epitope excision, epitope extraction and chemical modification of antigens can be employed (Tomer, 2000, Protein Science 9:487-496). Another method that can be used to identify the amino acids within a polypeptide with which an antigen-binding domain of an antibody interacts is hydrogen/deuterium exchange detected by mass spectrometry. In general terms, the hydrogen/deuterium exchange method involves deuterium-labeling the protein of interest, followed by binding the antibody to the deuterium-labeled protein. Next, the protein/antibody complex is transferred to water to allow hydrogen-deuterium exchange to occur at all residues except for the residues protected by the antibody (which remain deuterium-labeled). After dissociation of the antibody, the target protein is subjected to protease cleavage and mass spectrometry analysis, thereby revealing the deuterium-labeled residues which correspond to the specific amino acids with which the antibody interacts. See, e.g., Ehring (1999) Analytical Biochemistry 267(2):252-259; Engen and Smith (2001) Anal. Chem. 73:256A-265A. X-ray crystallography of the antigen/antibody complex may also be used for epitope mapping purposes.

[0185] The present invention further includes anti-PSMA antibodies that bind to the same epitope as any of the specific exemplary antibodies described herein (e.g. antibodies comprising any of the amino acid sequences as set forth in Table 1 herein). Likewise, the present invention also includes anti-PSMA antibodies that compete for binding to PSMA with any of the specific exemplary antibodies described herein (e.g. antibodies comprising any of the amino acid sequences as set forth in Table 1 herein).

[0186] The present invention also includes bispecific antigen-binding molecules comprising a first antigen-binding domain that specifically binds human CD3 and/or cynomolgus CD3 with low or detectable binding affinity, and a second antigen binding domain that specifically binds human PSMA, wherein the first antigen-binding domain binds to the same epitope on CD3 as any of the specific exemplary CD3-specific antigen-binding domains described herein, and/or wherein the second antigen-binding domain binds to the same epitope on PSMA as any of the specific exemplary PSMA-specific antigen-binding domains described herein.

[0187] Likewise, the present invention also includes bispecific antigen-binding molecules comprising a first antigen-binding domain that specifically binds human CD3, and a second antigen binding domain that specifically binds human PSMA, wherein the first antigen-binding domain competes for binding to CD3 with any of the specific exemplary CD3-specific antigen-binding domains described herein, and/or wherein the second antigen-binding domain competes for binding to PSMA with any of the specific exemplary PSMA-specific antigen-binding domains described herein.

[0188] One can easily determine whether a particular antigen-binding molecule (e.g., antibody) or antigen-binding domain thereof binds to the same epitope as, or competes for binding with, a reference antigen-binding molecule of the present invention by using routine methods known in the art. For example, to determine if a test antibody binds to the same epitope on PSMA (or CD3) as a reference bispecific antigen-binding molecule of the present invention, the reference bispecific molecule is first allowed to bind to a PSMA protein (or CD3 protein). Next, the ability of a test antibody to bind to the PSMA (or CD3) molecule is assessed. If the test antibody is able to bind to PSMA (or CD3) following saturation binding with the reference bispecific antigen-binding molecule, it can be concluded that the test antibody binds to a different epitope of PSMA (or CD3) than the reference bispecific antigen-binding molecule. On the other hand, if the test antibody is not able to bind to the PSMA (or CD3) molecule following saturation binding with the reference bispecific antigen-binding molecule, then the test antibody may bind to the same epitope of PSMA (or CD3) as the epitope bound by the reference bispecific antigen-binding molecule of the invention. Additional routine experimentation (e.g., peptide mutation and binding analyses) can then be carried out to confirm whether the observed lack of binding of the test antibody is in fact due to binding to the same epitope as the reference bispecific antigen-binding molecule or if steric blocking (or another phenomenon) is responsible for the lack of observed binding. Experiments of this sort can be performed using ELISA, RIA, Biacore™, flow cytometry or any other quantitative or qualitative antibody-binding assay available in the art. In accordance with certain embodiments of the present invention, two antigen-binding proteins bind to the same (or overlapping) epitope if, e.g., a 1-, 5-, 10-, 20- or 100-fold excess of one antigen-binding protein inhibits binding of the other by at least 50% but preferably 75%, 90% or even 99% as measured in a competitive binding assay (see, e.g., Junghans et al., Cancer Res. 1990:50:1495-1502). Alternatively, two antigen-binding proteins are deemed to bind to the same epitope if essentially all amino acid mutations in the antigen that reduce or eliminate binding of one antigen-binding protein reduce or eliminate binding of the other. Two antigen-binding proteins are deemed to have “overlapping epitopes” if only a subset of the amino acid mutations that reduce or eliminate binding of one antigen-binding protein reduce or eliminate binding of the other.

[0189] To determine if an antibody or antigen-binding domain thereof competes for binding with a reference antigen-binding molecule, the above-described binding methodology is performed in two orientations: In a first orientation, the reference antigen-binding molecule is allowed to bind to a PSMA protein (or CD3 protein) under saturating conditions followed by assessment of binding of the test antibody to the PSMA (or CD3) molecule. In a second orientation, the test antibody is allowed to bind to a PSMA (or CD3) molecule under saturating conditions followed by assessment of binding of the reference antigen-binding molecule to the PSMA (or CD3) molecule. If, in both orientations, only the first (saturating) antigen-binding molecule is capable of binding to the PSMA (or CD3) molecule, then it is concluded that the test antibody and the reference antigen-binding molecule compete for binding to PSMA (or CD3). As will be appreciated by a person of ordinary skill in the art, an antibody that competes for binding with a reference antigen-binding molecule may not necessarily bind to the same epitope as the reference antibody, but may sterically block binding of the reference antibody by binding an overlapping or adjacent epitope.

### Preparation of Antigen-Binding Domains and Construction of Bispecific Molecules

[0190] Antigen-binding domains specific for particular antigens can be prepared by any antibody generating technology known in the art. Once obtained, two different antigen-binding domains, specific for two different antigens (e.g., CD3 and PSMA), can be appropriately arranged relative to one another to produce a bispecific antigen-binding molecule of the present invention using routine methods. (A discussion of exemplary bispecific antibody formats that can be used to construct the bispecific antigen-binding molecules of the present invention is provided elsewhere herein). In certain embodiments, one or more of the individual components (e.g., heavy and light chains) of the multispecific antigen-binding molecules of the invention are derived from chimeric, humanized or fully human antibodies. Methods for making such antibodies are well known in the art. For example, one or more of the heavy and/or light chains of the bispecific antigen-binding molecules of the present invention can be prepared using VELOCIMMUNE™ technology. Using VELOCIMMUNE™ technology (or any other human antibody generating technology), high affinity chimeric antibodies to a particular antigen (e.g., CD3 or PSMA) are initially isolated having a human variable region and a mouse constant region. The antibodies are characterized and selected for desirable characteristics, including affinity, selectivity, epitope, etc. The mouse constant regions are replaced with a desired human constant region to generate fully human heavy and/or light chains that can be incorporated into the bispecific antigen-binding molecules of the present invention.

[0191] Genetically engineered animals may be used to make human bispecific antigen-binding molecules. For example, a genetically modified mouse can be used which is incapable of rearranging and expressing an endogenous mouse immunoglobulin light chain variable sequence, wherein the mouse expresses only one or two human light chain variable domains encoded by human immunoglobulin sequences operably linked to the mouse kappa constant gene at the endogenous mouse kappa locus. Such genetically modified mice can be used to produce fully human bispecific antigen-binding molecules comprising two different heavy chains that associate with an identical light chain that comprises a variable domain derived from one of two different human light chain variable region gene segments. (See, e.g., US 2011/0195454 for a detailed discussion of such engineered mice and the use thereof to produce bispecific antigen-binding molecules).

### Bioequivalents

[0192] The present invention encompasses antigen-binding molecules having amino acid sequences that vary from those of the exemplary molecules disclosed herein but that retain the ability to bind CD3 and/or PSMA. Such variant molecules may comprise one or more additions, deletions, or substitutions of amino acids when compared to parent sequence, but exhibit biological activity that is essentially equivalent to that of the described bispecific antigen-binding molecules.

[0193] The present invention includes antigen-binding molecules that are bioequivalent to any of the exemplary antigen-binding molecules set forth herein. Two antigen-binding proteins, or antibodies, are considered bioequivalent if, for example, they are pharmaceutical equivalents or pharmaceutical alternatives whose rate and extent of absorption do not show a significant difference when administered at the same molar dose under similar experimental conditions, either single does or multiple dose. Some antigen-binding proteins will be considered equivalents or pharmaceutical alternatives if they are equivalent in the extent of their absorption but not in their rate of absorption and yet may be considered bioequivalent because such differences in the rate of absorption are intentional and are reflected in the labeling, are not essential to the attainment of effective body drug concentrations on, e.g., chronic use, and are considered medically insignificant for the particular drug product studied.

[0194] In one embodiment, two antigen-binding proteins are bioequivalent if there are no clinically meaningful differences in their safety, purity, and potency.

[0195] In one embodiment, two antigen-binding proteins are bioequivalent if a patient can be switched one or more times between the reference product and the biological product without an expected increase in the risk of adverse effects, including a clinically significant change in immunogenicity, or diminished effectiveness, as compared to continued therapy without such switching.

[0196] In one embodiment, two antigen-binding proteins are bioequivalent if they both act by a common mechanism or mechanisms of action for the condition or conditions of use, to the extent that such mechanisms are known.

[0197] Bioequivalence may be demonstrated by in vivo and in vitro methods. Bioequivalence measures include, e.g., (a) an in vivo test in humans or other mammals, in which the concentration of the antibody or its metabolites is measured in blood, plasma, serum, or other biological fluid as a function of time; (b) an in vitro test that has been correlated with and is reasonably predictive of human in vivo bioavailability data; (c) an in vivo test in humans or other mammals in which the appropriate acute pharmacological effect of the antibody (or its target) is measured as a function of time; and (d) in a well-controlled clinical trial that establishes safety, efficacy, or bioavailability or bioequivalence of an antigen-binding protein.

[0198] Bioequivalent variants of the exemplary bispecific antigen-binding molecules set forth herein may be constructed by, for example, making various substitutions of residues or sequences or deleting terminal or internal residues or sequences not needed for biological activity. For example, cysteine residues not essential for biological activity can be deleted or replaced with other amino acids to prevent formation of unnecessary or incorrect intramolecular disulfide bridges upon renaturation. In other contexts, bioequivalent antigen-binding proteins may include variants of the exemplary bispecific antigen-binding molecules set forth herein comprising amino acid changes which modify the glycosylation characteristics of the molecules, e.g., mutations which eliminate or remove glycosylation.

### Species Selectivity and Species Cross-Reactivity

[0199] According to certain embodiments of the invention, antigen-binding molecules are provided which bind to human CD3 but not to CD3 from other species. Also provided are antigen-binding molecules which bind to human PSMA but not to PSMA from other species. The present invention also includes antigen-binding molecules that bind to human CD3 and to CD3 from one or more non-human species; and/or antigen-binding molecules that bind to human PSMA and to PSMA from one or more non-human species.

[0200] According to certain exemplary embodiments of the invention, antigen-binding molecules are provided which bind to human CD3 and/or human PSMA and may bind or not bind, as the case may be, to one or more of mouse, rat, guinea pig, hamster, gerbil, pig, cat, dog, rabbit, goat, sheep, cow, horse, camel, cynomolgus, marmoset, rhesus or chimpanzee CD3 and/or PSMA. For example, in a particular exemplary embodiment of the present invention bispecific antigen-binding molecules are provided comprising a first antigen-binding domain that binds human CD3 and cynomolgus CD3, and a second antigen-binding domain that specifically binds human PSMA.

### Immunoconjugates

[0201] The present invention encompasses antigen-binding molecules conjugated to a therapeutic moiety (“immunoconjugate”), such as a cytotoxin, a chemotherapeutic drug, an immunosuppressant or a radioisotope. Cytotoxic agents include any agent that is detrimental to cells. Examples of suitable cytotoxic agents and chemotherapeutic agents for forming immunoconjugates are known in the art, (see for example, WO 05/103081).

### Therapeutic Formulation and Administration

[0202] The present invention provides pharmaceutical compositions comprising the antigen-binding molecules of the present invention. The pharmaceutical compositions of the invention are formulated with suitable carriers, excipients, and other agents that provide improved transfer, delivery, tolerance, and the like. A multitude of appropriate formulations can be found in the formulary known to all pharmaceutical chemists: Remington's Pharmaceutical Sciences, Mack Publishing Company, Easton, PA. These formulations include, for example, powders, pastes, ointments, jellies, waxes, oils, lipids, lipid (cationic or anionic) containing vesicles (such as LIPOFECTIN™, Life Technologies, Carlsbad, CA), DNA conjugates, anhydrous absorption pastes, oil-in-water and water-in-oil emulsions, emulsions carbowax (polyethylene glycols of various molecular weights), semi-solid gels, and semi-solid mixtures containing carbowax. See also Powell et al. “Compendium of excipients for parenteral formulations” PDA (1998) J Pharm Sci Technol 52:238-311.

[0203] The dose of antigen-binding molecule administered to a patient may vary depending upon the age and the size of the patient, target disease, conditions, route of administration, and the like. The preferred dose is typically calculated according to body weight or body surface area. When a bispecific antigen-binding molecule of the present invention is used for therapeutic purposes in an adult patient, it may be advantageous to intravenously administer the bispecific antigen-binding molecule of the present invention normally at a single dose of about 0.01 to about 20 mg/kg body weight, more preferably about 0.02 to about 7, about 0.03 to about 5, or about 0.05 to about 3 mg/kg body weight. Depending on the severity of the condition, the frequency and the duration of the treatment can be adjusted. Effective dosages and schedules for administering a bispecific antigen-binding molecule may be determined empirically; for example, patient progress can be monitored by periodic assessment, and the dose adjusted accordingly. Moreover, interspecies scaling of dosages can be performed using well-known methods in the art (e.g., Mordenti et al., 1991, Pharmaceut. Res. 8:1351).

[0204] Various delivery systems are known and can be used to administer the pharmaceutical composition of the invention, e.g., encapsulation in liposomes, microparticles, microcapsules, recombinant cells capable of expressing the mutant viruses, receptor mediated endocytosis (see, e.g., Wu et al., 1987, J. Biol. Chem. 262:4429-4432). Methods of introduction include, but are not limited to, intradermal, intramuscular, intraperitoneal, intravenous, subcutaneous, intranasal, epidural, and oral routes. The composition may be administered by any convenient route, for example by infusion or bolus injection, by absorption through epithelial or mucocutaneous linings (e.g., oral mucosa, rectal and intestinal mucosa, etc.) and may be administered together with other biologically active agents. Administration can be systemic or local.

[0205] A pharmaceutical composition of the present invention can be delivered subcutaneously or intravenously with a standard needle and syringe. In addition, with respect to subcutaneous delivery, a pen delivery device readily has applications in delivering a pharmaceutical composition of the present invention. Such a pen delivery device can be reusable or disposable. A reusable pen delivery device generally utilizes a replaceable cartridge that contains a pharmaceutical composition. Once all of the pharmaceutical composition within the cartridge has been administered and the cartridge is empty, the empty cartridge can readily be discarded and replaced with a new cartridge that contains the pharmaceutical composition. The pen delivery device can then be reused. In a disposable pen delivery device, there is no replaceable cartridge. Rather, the disposable pen delivery device comes prefilled with the pharmaceutical composition held in a reservoir within the device. Once the reservoir is emptied of the pharmaceutical composition, the entire device is discarded.

[0206] Numerous reusable pen and autoinjector delivery devices have applications in the subcutaneous delivery of a pharmaceutical composition of the present invention. Examples include, but are not limited to AUTOPEN™ (Owen Mumford, Inc., Woodstock, UK), DISETRONIC™ pen (Disetronic Medical Systems, Bergdorf, Switzerland), HUMALOG MIX 75/25™ pen, HUMALOG™ pen, HUMALIN 70/30™ pen (Eli Lilly and Co., Indianapolis, IN), NOVOPEN™ I, II and III (Novo Nordisk, Copenhagen, Denmark), NOVOPEN JUNIOR™ (Novo Nordisk, Copenhagen, Denmark), BD™ pen (Becton Dickinson, Franklin Lakes, NJ), OPTIPEN™, OPTIPEN PRO™, OPTIPEN STARLET™, and OPTICLIK™ (sanofi-aventis, Frankfurt, Germany), to name only a few. Examples of disposable pen delivery devices having applications in subcutaneous delivery of a pharmaceutical composition of the present invention include, but are not limited to the SOLOSTAR™ pen (sanofi-aventis), the FLEXPEN™ (Novo Nordisk), and the KWIKPEN™ (Eli Lilly), the SURECLICK™ Autoinjector (Amgen, Thousand Oaks, CA), the PENLET™ (Haselmeier, Stuttgart, Germany), the EPIPEN (Dey, L.P.), and the HUMIRA™ Pen (Abbott Labs, Abbott Park Ill.), to name only a few.

[0207] In certain situations, the pharmaceutical composition can be delivered in a controlled release system. In one embodiment, a pump may be used (see Langer, supra; Sefton, 1987, CRC Crit. Ref. Biomed. Eng. 14:201). In another embodiment, polymeric materials can be used; see, Medical Applications of Controlled Release, Langer and Wise (eds.), 1974, CRC Pres., Boca Raton, Florida. In yet another embodiment, a controlled release system can be placed in proximity of the composition's target, thus requiring only a fraction of the systemic dose (see, e.g., Goodson, 1984, in Medical Applications of Controlled Release, supra, vol. 2, pp. 115-138). Other controlled release systems are discussed in the review by Langer, 1990, Science 249:1527-1533.

[0208] The injectable preparations may include dosage forms for intravenous, subcutaneous, intracutaneous and intramuscular injections, drip infusions, etc. These injectable preparations may be prepared by methods publicly known. For example, the injectable preparations may be prepared, e.g., by dissolving, suspending or emulsifying the antibody or its salt described above in a sterile aqueous medium or an oily medium conventionally used for injections. As the aqueous medium for injections, there are, for example, physiological saline, an isotonic solution containing glucose and other auxiliary agents, etc., which may be used in combination with an appropriate solubilizing agent such as an alcohol (e.g., ethanol), a polyalcohol (e.g., propylene glycol, polyethylene glycol), a nonionic surfactant [e.g., polysorbate 80, HCO-50 (polyoxyethylene (50 mol) adduct of hydrogenated castor oil)], etc. As the oily medium, there are employed, e.g., sesame oil, soybean oil, etc., which may be used in combination with a solubilizing agent such as benzyl benzoate, benzyl alcohol, etc. The injection thus prepared is preferably filled in an appropriate ampoule.

[0209] Advantageously, the pharmaceutical compositions for oral or parenteral use described above are prepared into dosage forms in a unit dose suited to fit a dose of the active ingredients. Such dosage forms in a unit dose include, for example, tablets, pills, capsules, injections (ampoules), suppositories, etc. The amount of the aforesaid antibody contained is generally about 5 to about 500 mg per dosage form in a unit dose; especially in the form of injection, it is preferred that the aforesaid antibody is contained in about 5 to about 100 mg and in about 10 to about 250 mg for the other dosage forms.

### Therapeutic Uses of the Antigen-Binding Molecules

[0210] The present invention includes methods comprising administering to a subject in need thereof a therapeutic composition comprising an anti-PSMA antibody or antigen-binding fragment thereof, or a bispecific antigen-binding molecule that specifically binds CD3 and PSMA. The therapeutic composition can comprise any of the antibodies or bispecific antigen-binding molecules as disclosed herein and a pharmaceutically acceptable carrier or diluent. As used herein, the expression “a subject in need thereof” means a human or non-human animal that exhibits one or more symptoms or indicia of cancer (e.g., a subject expressing a tumor or suffering from any of the cancers mentioned herein below), or who otherwise would benefit from an inhibition or reduction in PSMA activity or a depletion of PSMA+ cells (e.g., prostate cancer cells).

[0211] The antibodies and bispecific antigen-binding molecules of the invention (and therapeutic compositions comprising the same) are useful, inter alia, for treating any disease or disorder in which stimulation, activation and/or targeting of an immune response would be beneficial. In particular, the anti-PSMA antibodies or the anti-CD3/anti-PSMA bispecific antigen-binding molecules of the present invention may be used for the treatment, prevention and/or amelioration of any disease or disorder associated with or mediated by PSMA expression or activity or the proliferation of PSMA+ cells. The mechanism of action by which the therapeutic methods of the invention are achieved include killing of the cells expressing PSMA in the presence of effector cells, for example, by CDC, apoptosis, ADCC, phagocytosis, or by a combination of two or more of these mechanisms. Cells expressing PSMA which can be inhibited or killed using the bispecific antigen-binding molecules of the invention include, for example, prostate tumor cells.

[0212] The antigen-binding molecules of the present invention may be used to treat, e.g., primary and/or metastatic tumors arising in the gastrointestinal tract, prostate, kidney, and/or bladder. In certain embodiments, the bispecific antigen-binding molecules of the invention are used to treat one or more of the following cancers: clear cell renal cell carcinoma, chromophobe renal cell carcinoma, (renal) oncocytoma, (renal) transitional cell carcinoma, prostate cancer, colorectal cancer, gastric cancer, urothelial carcinoma, (bladder) adenocarcinoma, or (bladder) small cell carcinoma. According to certain embodiments of the present invention, the anti-PSMA antibodies or anti-PSMA/anti-CD3 bispecific antibodies are useful for treating a patient afflicted with a castrate-resistant prostate cancer. According to other related embodiments of the invention, methods are provided comprising administering an anti-PSMA antibody or an anti-CD3/anti-PSMA bispecific antigen-binding molecule as disclosed herein to a patient who is afflicted with a castrate-resistant prostate cancer. Analytic/diagnostic methods known in the art, such as tumor scanning, etc., may be used to ascertain whether a patient harbors a tumor that is castrate-resistant.

[0213] The present invention also includes methods for treating residual cancer in a subject. As used herein, the term “residual cancer” means the existence or persistence of one or more cancerous cells in a subject following treatment with an anti-cancer therapy.

[0214] According to certain aspects, the present invention provides methods for treating a disease or disorder associated with PSMA expression (e.g., prostate cancer) comprising administering one or more of the anti-PSMA or bispecific antigen-binding molecules described elsewhere herein to a subject after the subject has been determined to have prostate cancer (e.g., castrate-resistant prostate cancer). For example, the present invention includes methods for treating prostate cancer comprising administering an anti-PSMA antibody or an anti-CD3/anti-PSMA bispecific antigen-binding molecule to a patient 1 day, 2 days, 3 days, 4 days, 5 days, 6 days, 1 week, 2 weeks, 3 weeks or 4 weeks, 2 months, 4 months, 6 months, 8 months, 1 year, or more after the subject has received hormone therapy (e.g., anti-androgen therapy).

### Combination Therapies and Formulations

[0215] The present invention provides methods which comprise administering a pharmaceutical composition comprising any of the exemplary antibodies and bispecific antigen-binding molecules described herein in combination with one or more additional therapeutic agents. Exemplary additional therapeutic agents that may be combined with or administered in combination with an antigen-binding molecule of the present invention include, e.g., an EGFR antagonist (e.g., an anti-EGFR antibody [e.g., cetuximab or panitumumab] or small molecule inhibitor of EGFR [e.g., gefitinib or erlotinib]), an antagonist of another EGFR family member such as Her2/ErbB2, ErbB3 or ErbB4 (e.g., anti-ErbB2, anti-ErbB3 or anti-ErbB4 antibody or small molecule inhibitor of ErbB2, ErbB3 or ErbB4 activity), an antagonist of EGFRvIII (e.g., an antibody that specifically binds EGFRvIII), a cMET anagonist (e.g., an anti-cMET antibody), an IGF1R antagonist (e.g., an anti-IGF1R antibody), a B-raf inhibitor (e.g., vemurafenib, sorafenib, GDC-0879, PLX-4720), a PDGFR-α inhibitor (e.g., an anti-PDGFR-α antibody), a PDGFR-β inhibitor (e.g., an anti-PDGFR-β antibody), a VEGF antagonist (e.g., a VEGF-Trap, see, e.g., U.S. Pat. No. 7,087,411 (also referred to herein as a “VEGF-inhibiting fusion protein”), anti-VEGF antibody (e.g., bevacizumab), a small molecule kinase inhibitor of VEGF receptor (e.g., sunitinib, sorafenib or pazopanib)), a DLL4 antagonist (e.g., an anti-DLL4 antibody disclosed in US 2009/0142354 such as REGN421), an Ang2 antagonist (e.g., an anti-Ang2 antibody disclosed in US 2011/0027286 such as H1H685P), a FOLH1 (PSMA) antagonist, a PRLR antagonist (e.g., an anti-PRLR antibody), a STEAP1 or STEAP2 antagonist (e.g., an anti-STEAP1 antibody or an anti-STEAP2 antibody), a TMPRSS2 antagonist (e.g., an anti-TMPRSS2 antibody), a MSLN antagonist (e.g., an anti-MSLN antibody), a CA9 antagonist (e.g., an anti-CA9 antibody), a uroplakin antagonist (e.g., an anti-uroplakin antibody), etc. Other agents that may be beneficially administered in combination with the antigen-binding molecules of the invention include cytokine inhibitors, including small-molecule cytokine inhibitors and antibodies that bind to cytokines such as IL-1, IL-2, IL-3, IL-4, IL-5, IL-6, IL-8, IL-9, IL-11, IL-12, IL-13, IL-17, IL-18, or to their respective receptors. The pharmaceutical compositions of the present invention (e.g., pharmaceutical compositions comprising an anti-CD3/anti-PSMA bispecific antigen-binding molecule as disclosed herein) may also be administered as part of a therapeutic regimen comprising one or more therapeutic combinations selected from “ICE”: ifosfamide (e.g., Ifex®), carboplatin (e.g., Paraplatin®), etoposide (e.g., Etopophos®, Toposar®, VePesid®, VP-16); “DHAP”: dexamethasone (e.g., Decadron®), cytarabine (e.g., Cytosar-U®, cytosine arabinoside, ara-C), cisplatin (e.g., Platinol®-AQ); and “ESHAP”: etoposide (e.g., Etopophos®, Toposar®, VePesid®, VP-16), methylprednisolone (e.g., Medrol®), high-dose cytarabine, cisplatin (e.g., Platinol®-AQ).

[0216] The present invention also includes therapeutic combinations comprising any of the antigen-binding molecules mentioned herein and an inhibitor of one or more of VEGF, Ang2, DLL4, EGFR, ErbB2, ErbB3, ErbB4, EGFRvIII, cMet, IGF1R, B-raf, PDGFR-α, PDGFR-β, FOLH1 (PSMA), PRLR, STEAP1, STEAP2, TMPRSS2, MSLN, CA9, uroplakin, or any of the aforementioned cytokines, wherein the inhibitor is an aptamer, an antisense molecule, a ribozyme, an siRNA, a peptibody, a nanobody or an antibody fragment (e.g., Fab fragment; F(ab′)₂ fragment; Fd fragment; Fv fragment; scFv; dAb fragment; or other engineered molecules, such as diabodies, triabodies, tetrabodies, minibodies and minimal recognition units). The antigen-binding molecules of the invention may also be administered and/or co-formulated in combination with antivirals, antibiotics, analgesics, corticosteroids and/or NSAIDs. The antigen-binding molecules of the invention may also be administered as part of a treatment regimen that also includes radiation treatment and/or conventional chemotherapy.

[0217] The additional therapeutically active component(s) may be administered just prior to, concurrent with, or shortly after the administration of an antigen-binding molecule of the present invention; (for purposes of the present disclosure, such administration regimens are considered the administration of an antigen-binding molecule “in combination with” an additional therapeutically active component).

[0218] The present invention includes pharmaceutical compositions in which an antigen-binding molecule of the present invention is co-formulated with one or more of the additional therapeutically active component(s) as described elsewhere herein.

### Administration Regimens

[0219] According to certain embodiments of the present invention, multiple doses of an antigen-binding molecule (e.g., an anti-PSMA antibody or a bispecific antigen-binding molecule that specifically binds PSMA and CD3) may be administered to a subject over a defined time course. The methods according to this aspect of the invention comprise sequentially administering to a subject multiple doses of an antigen-binding molecule of the invention. As used herein, “sequentially administering” means that each dose of an antigen-binding molecule is administered to the subject at a different point in time, e.g., on different days separated by a predetermined interval (e.g., hours, days, weeks or months). The present invention includes methods which comprise sequentially administering to the patient a single initial dose of an antigen-binding molecule, followed by one or more secondary doses of the antigen-binding molecule, and optionally followed by one or more tertiary doses of the antigen-binding molecule.

[0220] The terms “initial dose,” “secondary doses,” and “tertiary doses,” refer to the temporal sequence of administration of the antigen-binding molecule of the invention. Thus, the “initial dose” is the dose which is administered at the beginning of the treatment regimen (also referred to as the “baseline dose”); the “secondary doses” are the doses which are administered after the initial dose; and the “tertiary doses” are the doses which are administered after the secondary doses. The initial, secondary, and tertiary doses may all contain the same amount of the antigen-binding molecule, but generally may differ from one another in terms of frequency of administration. In certain embodiments, however, the amount of an antigen-binding molecule contained in the initial, secondary and/or tertiary doses varies from one another (e.g., adjusted up or down as appropriate) during the course of treatment. In certain embodiments, two or more (e.g., 2, 3, 4, or 5) doses are administered at the beginning of the treatment regimen as “loading doses” followed by subsequent doses that are administered on a less frequent basis (e.g., “maintenance doses”).

[0221] In one exemplary embodiment of the present invention, each secondary and/or tertiary dose is administered 1 to 26 (e.g., 1, 1½, 2, 2½, 3, 3½, 4, 4½, 5, 5½, 6, 6½, 7, 7½, 8, 8½, 9, 9½, 10, 10½, 11, 11½, 12, 12½, 13, 13½, 14, 14½, 15, 15½, 16, 16½, 17, 17½, 18, 18½, 19, 19½, 20, 20½, 21, 21½, 22, 22½, 23, 23½, 24, 24½, 25, 25½, 26, 26½, or more) weeks after the immediately preceding dose. The phrase “the immediately preceding dose,” as used herein, means, in a sequence of multiple administrations, the dose of antigen-binding molecule which is administered to a patient prior to the administration of the very next dose in the sequence with no intervening doses.

[0222] The methods according to this aspect of the invention may comprise administering to a patient any number of secondary and/or tertiary doses of an antigen-binding molecule (e.g., an anti-PSMA antibody or a bispecific antigen-binding molecule that specifically binds PSMA and CD3). For example, in certain embodiments, only a single secondary dose is administered to the patient. In other embodiments, two or more (e.g., 2, 3, 4, 5, 6, 7, 8, or more) secondary doses are administered to the patient. Likewise, in certain embodiments, only a single tertiary dose is administered to the patient. In other embodiments, two or more (e.g., 2, 3, 4, 5, 6, 7, 8, or more) tertiary doses are administered to the patient.

[0223] In embodiments involving multiple secondary doses, each secondary dose may be administered at the same frequency as the other secondary doses. For example, each secondary dose may be administered to the patient 1 to 2 weeks after the immediately preceding dose. Similarly, in embodiments involving multiple tertiary doses, each tertiary dose may be administered at the same frequency as the other tertiary doses. For example, each tertiary dose may be administered to the patient 2 to 4 weeks after the immediately preceding dose. Alternatively, the frequency at which the secondary and/or tertiary doses are administered to a patient can vary over the course of the treatment regimen. The frequency of administration may also be adjusted during the course of treatment by a physician depending on the needs of the individual patient following clinical examination.

### Diagnostic Uses of the Antibodies

[0224] The anti-PSMA antibodies of the present invention may also be used to detect and/or measure PSMA, or PSMA-expressing cells in a sample, e.g., for diagnostic purposes. For example, an anti-PSMA antibody, or fragment thereof, may be used to diagnose a condition or disease characterized by aberrant expression (e.g., over-expression, under-expression, lack of expression, etc.) of PSMA. Exemplary diagnostic assays for PSMA may comprise, e.g., contacting a sample, obtained from a patient, with an anti-PSMA antibody of the invention, wherein the anti-PSMA antibody is labeled with a detectable label or reporter molecule. Alternatively, an unlabeled anti-PSMA antibody can be used in diagnostic applications in combination with a secondary antibody which is itself detectably labeled. The detectable label or reporter molecule can be a radioisotope, such as ³H, ¹⁴C, ³²P, ³⁵S, or ¹²⁵I; a fluorescent or chemiluminescent moiety such as fluorescein isothiocyanate, or rhodamine; or an enzyme such as alkaline phosphatase, beta-galactosidase, horseradish peroxidase, or luciferase. Another exemplary diagnostic use of the anti-PSMA antibodies of the invention includes ⁸⁹Zr-labeled, such as ⁸⁹Zr-desferrioxamine-labeled, antibody for the purpose of noninvasive identification and tracking of tumor cells in a subject (e.g. positron emission tomography (PET) imaging). (See, e.g., Tavare, R. et al. Cancer Res. 2016 Jan. 1; 76(1):73-82; and Azad, B B. et al. Oncotarget. 2016 Mar. 15; 7(11):12344-58.) Specific exemplary assays that can be used to detect or measure PSMA in a sample include enzyme-linked immunosorbent assay (ELISA), radioimmunoassay (RIA), and fluorescence-activated cell sorting (FACS).

[0225] Samples that can be used in PSMA diagnostic assays according to the present invention include any tissue or fluid sample obtainable from a patient which contains detectable quantities of PSMA protein, or fragments thereof, under normal or pathological conditions. Generally, levels of PSMA in a particular sample obtained from a healthy patient (e.g., a patient not afflicted with a disease or condition associated with abnormal PSMA levels or activity) will be measured to initially establish a baseline, or standard, level of PSMA. This baseline level of PSMA can then be compared against the levels of PSMA measured in samples obtained from individuals suspected of having a PSMA related disease (e.g., a tumor containing PSMA-expressing cells) or condition.

### EXAMPLES

[0226] The following examples are put forth so as to provide those of ordinary skill in the art with a complete disclosure and description of how to make and use the methods and compositions of the invention, and are not intended to limit the scope of what the inventors regard as their invention. Efforts have been made to ensure accuracy with respect to numbers used (e.g., amounts, temperature, etc.) but some experimental errors and deviations should be accounted for. Unless indicated otherwise, parts are parts by weight, molecular weight is average molecular weight, temperature is in degrees Centigrade, and pressure is at or near atmospheric.

### Example 1: Generation of Anti-PSMA Antibodies

[0227] Anti-PSMA antibodies were obtained by immunizing a genetically modified mouse with a human PSMA antigen or by immunizing an engineered mouse comprising DNA encoding human immunoglobulin heavy and kappa light chain variable regions with a human PSMA antigen.

[0228] Mice were immunized with human prostate cancer cells (LNCaP, ATTC®, Manassas, Virginia, USA) expressing human PSMA (SEQ ID NO:1651; UniProtKB/Swiss-Prot. No. Q04609). Following immunization, splenocytes were harvested from each mouse and either (1) fused with mouse myeloma cells to preserve their viability and form hybridoma cells and screened for PSMA specificity, or (2) B-cell sorted (as described in US 2007/0280945A1) using a human PSMA with an N-terminal 6-His tag (R&D, Cat #4234-ZN) as the sorting reagent that binds and identifies reactive antibodies (antigen-positive B cells).

[0229] Chimeric antibodies to PSMA were initially isolated having a human variable region and a mouse constant region. The antibodies were characterized and selected for desirable characteristics, including affinity, selectivity, etc. If necessary, mouse constant regions were replaced with a desired human constant region, for example wild-type or modified IgG1 or IgG4, to generate a fully human anti-PSMA antibody. While the constant region selected may vary according to specific use, high affinity antigen-binding and target specificity characteristics reside in the variable region. The antibody name designations such as H1H11453N2 and H1M11900N denote fully human antibodies “H1H” or chimeric human variable/mouse constant region antibodies “H1M”. Antibodies identified by the hybridoma method are indicated with antibody ID numbers ending with “N” or “N2”; Antibodies identified by the B-cell sorting method are indicated with antibody ID numbers ending with “P” or “P2”.

[0230] Certain biological properties of the exemplary anti-PSMA antibodies generated in accordance with the methods of this Example are described in detail in the Examples set forth below.

### Example 2: Heavy and Light Chain Variable Region Amino Acid and Nucleic Acid Sequences of Anti-PSMA Antibodies

[0231] Table 1 sets forth the amino acid sequence identifiers of the heavy and light chain variable regions and CDRs of selected anti-PSMA antibodies of the invention. The corresponding nucleic acid sequence identifiers are set forth in Table 2.

TABLE 1
Amino Acid Sequence Identifiers

| Antibody | SEQ ID NOs: | | | | | | | |
|---|---|---|---|---|---|---|---|---|
| Designation | HCVR | HCDR1 | HCDR2 | HCDR3 | LCVR | LCDR1 | LCDR2 | LCDR3 |
| H1H11453N2 | 2 | 4 | 6 | 8 | 1642 | 1644 | 1646 | 1648 |
| H1H11792P2 | 10 | 12 | 14 | 16 | 1642 | 1644 | 1646 | 1648 |
| H1H11797P2 | 18 | 20 | 22 | 24 | 1642 | 1644 | 1646 | 1648 |
| H1H11800P2 | 26 | 28 | 30 | 32 | 1642 | 1644 | 1646 | 1648 |
| H1H11803P2 | 34 | 36 | 38 | 40 | 1642 | 1644 | 1646 | 1648 |
| H1H11804P2 | 42 | 44 | 46 | 48 | 1642 | 1644 | 1646 | 1648 |
| H1H11805P2 | 50 | 52 | 54 | 56 | 1642 | 1644 | 1646 | 1648 |
| H1H11808P2 | 58 | 60 | 62 | 64 | 1642 | 1644 | 1646 | 1648 |
| H1H11810P2 | 66 | 68 | 70 | 72 | 1642 | 1644 | 1646 | 1648 |
| H1H11835P2 | 74 | 76 | 78 | 80 | 1642 | 1644 | 1646 | 1648 |
| H1H11836P2 | 82 | 84 | 86 | 88 | 1642 | 1644 | 1646 | 1648 |
| H1H11837P2 | 90 | 92 | 94 | 96 | 1642 | 1644 | 1646 | 1648 |
| H1H11838P2 | 98 | 100 | 102 | 104 | 1642 | 1644 | 1646 | 1648 |
| H1H11841P2 | 106 | 108 | 110 | 112 | 1642 | 1644 | 1646 | 1648 |
| H1H11899N2 | 114 | 116 | 118 | 120 | 1642 | 1644 | 1646 | 1648 |
| H1H3465P | 122 | 124 | 126 | 128 | 130 | 132 | 134 | 136 |
| H1M11900N | 138 | 140 | 142 | 144 | 146 | 148 | 150 | 152 |

TABLE 2
Nucleic Acid Sequence Identifiers

| Antibody | SEQ ID NOs: | | | | | | | |
|---|---|---|---|---|---|---|---|---|
| Designation | HCVR | HCDR1 | HCDR2 | HCDR3 | LCVR | LCDR1 | LCDR2 | LCDR3 |
| H1H11453N2 | 1 | 3 | 5 | 7 | 1641 | 1643 | 1645 | 1647 |
| H1H11792P2 | 9 | 11 | 13 | 15 | 1641 | 1643 | 1645 | 1647 |
| H1H11797P2 | 17 | 19 | 21 | 23 | 1641 | 1643 | 1645 | 1647 |
| H1H11800P2 | 25 | 27 | 29 | 31 | 1641 | 1643 | 1645 | 1647 |
| H1H11803P2 | 33 | 35 | 37 | 39 | 1641 | 1643 | 1645 | 1647 |
| H1H11804P2 | 41 | 43 | 45 | 47 | 1641 | 1643 | 1645 | 1647 |
| H1H11805P2 | 49 | 51 | 53 | 55 | 1641 | 1643 | 1645 | 1647 |
| H1H11808P2 | 57 | 59 | 61 | 63 | 1641 | 1643 | 1645 | 1647 |
| H1H11810P2 | 65 | 67 | 69 | 71 | 1641 | 1643 | 1645 | 1647 |
| H1H11835P2 | 73 | 75 | 77 | 79 | 1641 | 1643 | 1645 | 1647 |
| H1H11836P2 | 81 | 83 | 85 | 87 | 1641 | 1643 | 1645 | 1647 |
| H1H11837P2 | 89 | 91 | 93 | 95 | 1641 | 1643 | 1645 | 1647 |
| H1H11838P2 | 97 | 99 | 101 | 103 | 1641 | 1643 | 1645 | 1647 |
| H1H11841P2 | 105 | 107 | 109 | 111 | 1641 | 1643 | 1645 | 1647 |
| H1H11899N2 | 113 | 115 | 117 | 119 | 1641 | 1643 | 1645 | 1647 |
| H1H3465P | 121 | 123 | 125 | 127 | 129 | 131 | 133 | 135 |
| H1M11900N | 137 | 139 | 141 | 143 | 145 | 147 | 149 | 151 |

### Example 3: Surface Plasmon Resonance Derived Binding Affinities and Kinetic Constants of Human Monoclonal Anti-PSMA Antibodies

[0232] In this example, anti-PSMA antibodies were assessed for their ability to bind to human PSMA. Binding affinities and kinetic constants of anti-PSMA antibodies to soluble human PSMA protein were determined by surface plasmon resonance at 37° C. using an antibody-capture format. Results are shown in Tables 3 and 4. Measurements were conducted on a Biacore™ T-200 instrument (GE Healthcare).

[0233] Briefly, a CM5 Biacore™ sensor surface was derivatized via amine coupling with a monoclonal mouse anti-human Fc antibody (GE, #BR-1008-39) or monoclonal goat anti-mouse Fc antibody (GE, #BR-1008-38) to capture purified anti-PSMA antibodies. Binding studies were performed in HBSP++ buffer composed of 0.01M HEPES, 0.15M NaCl, 2 mM Ca²⁺, 2 mM Mg²⁺, 0.05% v/v Surfactant P20, pH7.4. Varying concentrations of human PSMA expressed with an N-terminal hexahistidine tag (6h.hPSMA, R&D) prepared in HBSP++ running buffer (ranging from 50 to 0.78 nM, 4-fold dilutions) were injected over the anti-PSMA antibody captured surface at a flow rate of 30 μL/minute. Antibody-reagent association was monitored for 2 minutes while dissociation in HBSP++ running buffer was monitored for 8 minutes.

[0234] Kinetic association (kₐ) and dissociation (kₐ) rate constants were determined by fitting the real-time sensorgrams to a 1:1 binding model using Scrubber 2.0c curve fitting software. Binding dissociation equilibrium constants (K_{D}) and dissociative half-lives (t½) were calculated from the kinetic rate constants as: K_{D} (M)=k_{d}/Kₐ; and t_{1/2} (min)=(ln 2/(60*k_{d}).

[0235] As shown in Tables 3 and 4, the anti-PSMA antibodies of the invention bound to human PSMA in the antibody capture format with varying affinities and K_{D} values ranging from 19.9 pM to 75.6 nM. Several exemplary anti-PSMA antibodies, such as H1H3465P and H1H11810P2, displayed strong affinity to human PSMA protein, with sub-nanomolar K_{D} values.

TABLE 3
Affinities of anti-PSMA human IgG1 antibodies
to soluble human PSMA at 37° C.

| Antibody ID | ka (1/Ms) | kd (1/s) | KD (M) | t_{1/2} (min) |
|---|---|---|---|---|
| H1H3465P | 2.67E+05 | 6.06E−05 | 2.27E−10 | 190.6 |
| H1H11792P2 | 4.73E+05 | 9.70E−05 | 2.05E−10 | 119.1 |
| H1H11797P2 | 1.68E+05 | 6.30E−04 | 3.74E−09 | 18.3 |
| H1H11800P2 | 2.51E+05 | 4.10E−05 | 1.63E−10 | 281.8 |
| H1H11803P2 | 4.57E+05 | 6.08E−04 | 1.33E−09 | 19 |
| H1H11804P2 | 2.03E+04 | 8.01E−04 | 3.94E−08 | 14.4 |
| H1H11805P2 | 1.29E+05 | 9.74E−03 | 7.56E−08 | 1.2 |
| H1H11808P2 | 1.78E+05 | ≤1E−05 | ≤5.63E−11 | ≤1.155 |
| H1H11810P2 | 5.03E+05 | ≤1E−05 | ≤1.99E−11 | ≤1.155 |
| H1H11835P2 | 1.75E+05 | 2.46E−03 | 1.40E−08 | 4.7 |
| H1H11836P2 | 3.27E+05 | 2.80E−04 | 8.55E−10 | 41.3 |
| H1H11837P2 | 4.41E+05 | 7.34E−04 | 1.66E−09 | 15.7 |
| H1H11838P2 | 2.37E+05 | 4.71E−04 | 1.99E−09 | 24.5 |
| H1H11841P2 | IC | IC | IC | IC |

IC: inconclusive

TABLE 4
Affinities of anti-PSMA mouse constant antibodies
to soluble human PSMA at 37° C.

| Antibody ID | ka (1/Ms) | kd (1/s) | KD (M) | t_{1/2} (min) |
|---|---|---|---|---|
| H2M11899N | 1.51E+05 | 2.65E−04 | 1.76E−09 | 43.6 |
| H1M11453N | 1.85E+05 | 3.56E−04 | 1.93E−09 | 32.4 |
| H1M11900N | 1.57E+05 | 4.06E−03 | 2.58E−08 | 2.8 |

### Example 4: Generation of Bispecific Antibodies that Bind Prostate-Specific Membrane Antigen (PSMA) and CD3

[0236] The present invention provides bispecific antigen-binding molecules that bind CD3 and Prostate-Specific Membrane Antigen (PSMA); such bispecific antigen-binding molecules are also referred to herein as “anti-PSMA/anti-CD3 bispecific molecules.” The anti-PSMA portion of the anti-PSMA/anti-CD3 bispecific molecule is useful for targeting tumor cells that express PSMA, and the anti-CD3 portion of the bispecific molecule is useful for activating T-cells. The simultaneous binding of PSMA on a tumor cell and CD3 on a T-cell facilitates directed killing (cell lysis) of the targeted tumor cell by the activated T-cell.

[0237] Bispecific antibodies comprising an anti-PSMA-specific binding domain and an anti-CD3-specific binding domain were constructed using standard methodologies, wherein the anti-PSMA antigen binding domain and the anti-CD3 antigen binding domain each comprise different, distinct HCVRs paired with a common LCVR. In some instances the bispecific antibodies were constructed utilizing a heavy chain from an anti-CD3 antibody, a heavy chain from an anti-PSMA antibody and a common light chain In other instances, the bispecific antibodies were constructed utilizing a heavy chain from an anti-CD3 antibody, a heavy chain from an anti-PSMA antibody and a light chain from an anti-CD3 antibody.

[0238] The bispecific antibodies described in the following examples consist of binding arms known to bind to human soluble heterodimeric hCD3ε/δ protein (as described in Examples 9-13 herein); and human PSMA (see Examples 1-3 above). Exemplified bispecific antibodies were manufactured having a modified (chimeric) IgG4 Fc domain as set forth in US Patent Application Publication No. US20140243504A1, published on Aug. 28, 2014.

[0239] A summary of the component parts of the antigen-binding domains of the various anti-PSMAxCD3 bispecific antibodies constructed is set forth in Table 5.

TABLE 5
Summary of Component Parts of PSMAxCD3 Bispecific Antibodies

| | Anti-PSMA | Anti-CD3 | |
|---|---|---|---|
| | Antigen-Binding | Antigen-Binding | Common |
| | Domain | Domain | Light Chain |
| Bispecific | Heavy Chain | Heavy Chain | Variable |
| Antibody Identifier | Variable Region | Variable Region | Region |
| BSPSMA/CD3-001 | PSMA-VH-3465 | CD3-VH-A | CD3-VL-A |
| BSPSMA/CD3-002 | PSMA-VH-3465 | CD3-VH-B | CD3-VL-B |
| BSPSMA/CD3-003 | PSMA-VH-11810 | CD3-VH-G | VK 1-39 JK 5 |
| | | | (SEQ ID |
| | | | NO: 1386) |
| BSPSMA/CD3-200 | PSMA-VH-11810 | CD3-VH-G2 | VK 1-39 JK 5 |
| | | | (SEQ ID |
| | | | NO: 1386) |
| BSPSMA/CD3-300 | PSMA-VH-11810 | CD3-VH-G3 | VK 1-39 JK 5 |
| | | | (SEQ ID |
| | | | NO: 1386) |
| BSPSMA/CD3-400 | PSMA-VH-11810 | CD3-VH-G4 | VK 1-39 JK 5 |
| | | | (SEQ ID |
| | | | NO: 1386) |
| BSPSMA/CD3-004 | PSMA-VH-11810 | CD3-VH-G5 | VK 1-39 JK 5 |
| | | | (SEQ ID |
| | | | NO: 1386) |
| BSPSMA/CD3-800 | PSMA-VH-11810 | CD3-VH-G8 | VK 1-39 JK 5 |
| | | | (SEQ ID |
| | | | NO: 1386) |
| BSPSMA/CD3-900 | PSMA-VH-11810 | CD3-VH-G9 | VK 1-39 JK 5 |
| | | | (SEQ ID |
| | | | NO: 1386) |
| BSPSMA/CD3- | PSMA-VH-11810 | CD3-VH-G10 | VK 1-39 JK 5 |
| 1000 | | | (SEQ ID |
| | | | NO: 1386) |
| BSPSMA/CD3- | PSMA-VH-11810 | CD3-VH-G11 | VK 1-39 JK 5 |
| 1100 | | | (SEQ ID |
| | | | NO: 1386) |
| BSPSMA/CD3- | PSMA-VH-11810 | CD3-VH-G12 | VK 1-39 JK 5 |
| 1200 | | | (SEQ ID |
| | | | NO: 1386) |
| BSPSMA/CD3- | PSMA-VH-11810 | CD3-VH-G13 | VK 1-39 JK 5 |
| 1300 | | | (SEQ ID |
| | | | NO: 1386) |
| BSPSMA/CD3- | PSMA-VH-11810 | CD3-VH-G14 | VK 1-39 JK 5 |
| 1400 | | | (SEQ ID |
| | | | NO: 1386) |
| BSPSMA/CD3- | PSMA-VH-11810 | CD3-VH-G15 | VK 1-39 JK 5 |
| 1500 | | | (SEQ ID |
| | | | NO: 1386) |
| BSPSMA/CD3- | PSMA-VH-11810 | CD3-VH-G16 | VK 1-39 JK 5 |
| 1600 | | | (SEQ ID |
| | | | NO: 1386) |
| BSPSMA/CD3- | PSMA-VH-11810 | CD3-VH-G17 | VK 1-39 JK 5 |
| 1700 | | | (SEQ ID |
| | | | NO: 1386) |
| BSPSMA/CD3- | PSMA-VH-11810 | CD3-VH-G18 | VK 1-39 JK 5 |
| 1800 | | | (SEQ ID |
| | | | NO: 1386) |
| BSPSMA/CD3- | PSMA-VH-11810 | CD3-VH-G19 | VK 1-39 JK 5 |
| 1900 | | | (SEQ ID |
| | | | NO: 1386) |
| BSPSMA/CD3-005 | PSMA-VH-11810 | CD3-VH-G20 | VK 1-39 JK 5 |
| | | | (SEQ ID |
| | | | NO: 1386) |
| BSPSMA/CD3- | PSMA-VH-11810 | CD3-VH-G21 | VK 1-39 JK 5 |
| 2100 | | | (SEQ ID |
| | | | NO: 1386) |

[0240] The anti-PSMA heavy chain variable region PSMA-VH-3465 is the HCVR of H1H3465P (SEQ ID NO:122) from Table 1. The anti-PSMA heavy chain variable region PSMA-VH-11810 is the HCVR of H1H11810P2 (SEQ ID NO:66) from Table 1.

[0241] The anti-CD3 heavy chain variable region CD3-VH-A is the HCVR of H1H5778P (SEQ ID NO:922) from Table 12. The anti-CD3 heavy chain variable region CD3-VH-B is the HCVR of H1H2712N (SEQ ID NO:154) from Table 12. The anti-CD3 heavy chain variable regions CD3-VH-G, CD3-VH-G2, CD3-VH-G3, CD3-VH-G4, CD3-VH-G5, CD3-VH-G8, CD3-VH-G9, CD3-VH-G10, CD3-VH-G11, CD3-VH-G12, CD3-VH-G13, CD3-VH-G14, CD3-VH-G15, CD3-VH-G16, CD3-VH-G17, CD3-VH-G18, CD3-VH-G19, CD3-VH-G20, and CD3-VH-G21 are described in Table 18.

[0242] The light chains in Table 5 were common to both the CD3 and PSMA targeting arms of the bispecific antibodies. The anti-CD3 light chain variable region CD3-VL-A is the LCVR of H1H5778P (SEQ ID NO:930) from Table 12. The anti-CD3 light chain variable region CD3-VL-B is the LCVR of H1H2712N (SEQ ID NO:162) from Table 12. The light chain variable region VK 1-39 JK 5 is SEQ ID NO: 1386 from Table 20. Table 1 sets out amino acid sequence identifiers for the various heavy chain variable regions, and their corresponding CDRs, of the anti-PSMA arms of the bispecific antibodies of this Example. Table 2 sets out the sequence identifiers for the nucleotide sequences encoding the heavy chain variable regions, and their corresponding CDRs, of the anti-PSMA antigen-binding domains of the bispecific antibodies of this Example.

[0243] Tables 12, 14, 15, 18, and 20 describe amino acid sequences of the heavy chain variable regions, and their corresponding CDRs, for the anti-CD3 arms of the bispecific antibodies, as well as amino acid sequences for the light chain variable regions, and their corresponding CDRs, common to both arms of the bispecific antibodies of this Example. Tables 13, 16, 17, 19, and 21 describe the corresponding nucleotide sequences for these features of the bispecific antibodies of this Example.

### Example 5: Binding Affinities of Exemplified Bispecific Antibodies as Measured by FACS Analysis

[0244] In this example, the ability of the anti-PSMA/anti-CD3 bispecific antibodies described in Example 4 to bind to human PSMA expressing cell lines and to human and cynomolgus CD3-expressing cell lines via FACS was determined. As described above, the bispecific antibodies of this invention utilized a PSMA-specific heavy chain (HC) binding arm paired with a panel of anti-CD3 HC binding arms and a common light chain. The PSMA-HC binding arms in the bispecific antibodies, below, demonstrated potent binding to human PSMA protein via surface plasmon resonance (Example 3). As described in Examples 6 and 13 herein, the CD3-binding HC arms also displayed a range of affinities to human soluble heterodimeric hCD3ε/δ.mFc protein via surface plasmon resonance.

[0245] Briefly, 2×10⁵ cells/well of human CD3-expressing Jurkat, cynomolgus T, or human PSMA-specific expressing cells were incubated with a serial dilution of bispecific antibodies for 30 min at 4° C. After incubation, cells were washed and a goat F(ab′)₂ anti-human Fcγ PE labeled secondary (Jackson Immunolabs) was added to the cells for an additional 30 min. Next, cells were washed, re-suspended in cold PBS+1% BSA and analyzed via flow cytometry on a BD FACS Canto II.

[0246] For FACS analysis, cells were gated by forward scatter height vs. forward scatter area for single events selection, followed by side and forward scatters. The EC₅₀ for cell binding titration was determined using Prism software. Values were calculated using 4-parameter non-linear regression analysis.

TABLE 6
FACS Binding on CD3 and PSMA-Specific Cell lines

| Bispecific | Anti-CD3- | | Cyno T- | B16F10.9/ | |
|---|---|---|---|---|---|
| Antibody | Binding | Jurkat | cells | PSMA | 22RV1 |
| Identifier | Arm | EC₅₀ [M] | EC₅₀ [M] | EC₅₀ [M] | EC₅₀ [M] |
| BSPSMA/ | CD3-VH- | 3.91E−08 | NT | NT | 7.85E−08 |
| CD3-001 | A | | | | |
| BSPSMA/ | CD3-VH- | NT | NT | NT | NT |
| CD3-002 | B | | | | |
| BSPSMA/ | CD3-VH- | 1.65E−08 | 1.42E−08 | 2.26E−09 | NT |
| CD3-003 | G | | | | |
| BSPSMA/ | CD3-VH- | NB | NB | 1.88E−09 | NT |
| CD3-200 | G2 | | | | |
| BSPSMA/ | CD3-VH- | NB | NB | 1.90E−09 | NT |
| CD3-300 | G3 | | | | |
| BSPSMA/ | CD3-VH- | NB | NB | 1.72E−09 | NT |
| CD3-400 | G4 | | | | |
| BSPSMA/ | CD3-VH- | ~1.0E−06 | NB | 1.31E−09 | NT |
| CD3-004 | G5 | | | | |
| BSPSMA/ | CD3-VH- | 1.93E−08 | 1.96E−08 | 1.31E−09 | NT |
| CD3-800 | G8 | | | | |
| BSPSMA/ | CD3-VH- | 2.74E−07 | NB | 1.43E−09 | NT |
| CD3-900 | G9 | | | | |
| BSPSMA/ | CD3-VH- | 2.77E−07 | NB | 1.19E−09 | NT |
| CD3-1000 | G10 | | | | |
| BSPSMA/ | CD3-VH- | 1.83E−08 | 8.90E−07 | 1.03E−09 | NT |
| CD3-1100 | G11 | | | | |
| BSPSMA/ | CD3-VH- | 4.72E−08 | NB | 1.16E−09 | NT |
| CD3-1200 | G12 | | | | |
| BSPSMA/ | CD3-VH- | 1.02E−07 | 2.17E−06 | 1.25E−09 | NT |
| CD3-1300 | G13 | | | | |
| BSPSMA/ | CD3-VH- | 3.19E−08 | 1.70E−07 | 1.30E−09 | NT |
| CD3-1400 | G14 | | | | |
| BSPSMA/ | CD3-VH- | 9.30E−08 | NB | 1.21E−09 | NT |
| CD3-1500 | G15 | | | | |
| BSPSMA/ | CD3-VH- | 5.68E−08 | NB | 1.03E−09 | NT |
| CD3-1600 | G16 | | | | |
| BSPSMA/ | CD3-VH- | 2.00E−07 | 3.35E−06 | 1.34E−09 | NT |
| CD3-1700 | G17 | | | | |
| BSPSMA/ | CD3-VH- | 1.26E−07 | NB | 2.16E−09 | NT |
| CD3-1800 | G18 | | | | |
| BSPSMA/ | CD3-VH- | 6.07E−08 | NB | 1.35E−09 | NT |
| CD3-1900 | G19 | | | | |
| BSPSMA/ | CD3-VH- | 2.10E−07 | 6.14E−06 | 2.09E−09 | NT |
| CD3-005 | G20 | | | | |
| BSPSMA/ | CD3-VH- | 1.06E−07 | NB | 1.14E−09 | NT |
| CD3-2100 | G21 | | | | |

NB = no binding;
NT = not tested

[0247] As shown in Table 6, the anti-PSMA/anti-CD3 bispecific antibodies tested demonstrated specificity of binding to human PSMA-expressing B16F10.9/hPSMA and 22RV1 cell lines via FACS. The detection limit for FACS binding is 1 μM EC50.

[0248] As shown in Table 6, the CD3 binding arms of each CD3×PSMA bispecific antibody displayed a range of cell binding affinity to human CD3 expressing Jurkat cells (15 to 300 nM EC50 range). Importantly, the CD3 arms that showed weak-to-no binding to human CD3 heterodimeric protein via surface plasmon resonance (see Table 7 hereinbelow) also correlated with weak to no observable binding on Jurkat cells (i.e. CD3-VH-G2, CD3-VH-G3, CD3-VH-G5). Several CD3-binding arms also displayed cross reactivity to cynomolgus T-cells. All tested bispecific antibodies displayed similar cell binding on respective PSMA-expressing cell lines, confirming that bispecific pairing with individual CD3 arms did not affect or diminish PSMA-specific binding (PSMA-specific binding was less than or equal to 5.6 nM (high affinity) in all examples tested).

[0249] Antibodies exhibiting weak-to-no detectable binding to human CD3, and also exhibiting weak-to-no binding to cynomolgus CD3, were considered advantageous for avidity-driven bispecific pairing in accordance with the present invention, and were further tested for cytotoxicity in in vitro and in vivo assays.

### Example 6: Binding Affinities of Exemplified Antibodies as Measured by a Surface Plasmon Resonance Binding Assay

[0250] Binding affinities and kinetic constants of anti-PSMA×anti-CD3 bispecific antibodies to soluble heterodimeric hCD3ε/δ.mFc protein (hCD3ε=UniProtKB/Swiss-Prot: P07766.2; SEQ_ID NO: 1652; hCD3δ=UniProtKB/Swiss-Prot: P04234.1, SEQ ID NO: 1653) were determined by surface plasmon resonance at 37° C. using an antigen-capture format (Table 7). Measurements were conducted on a Sierra Sensors MASS-1 instrument.

[0251] In the antigen-capture format, the MASS-1 high-density amine sensor surface was derivatized with a goat anti-mouse IgG2a polyclonal antibody (Southern Biotech). Soluble heterodimeric CD3 protein was captured and the respective antibodies were injected over the captured antigen.

[0252] Kinetic association (kₐ) and dissociation (k_{d}) rate constants were determined by processing and fitting the data to a 1:1 binding model using MASS-1 AnalyserR2 curve fitting software. Binding dissociation equilibrium constants (K_{D}) and dissociative half-lives (t_{1/2}) were calculated from the kinetic rate constants as: K_{D} (M)=k_{d}/kₐ; and t_{1/2} (min)=(ln 2/(60*k_{d}).

TABLE 7
Affinities of anti-CD3 Bispecific Antibodies to Soluble Human CD3

| | Binding at 37° C./Antigen-Capture Format | | | | |
|---|---|---|---|---|---|
| | Corresponding | | | | |
| | anti- | | | | |
| Bispecific | CD3 Antigen- | | | | |
| Antibody | Binding HCVR | | | | T½ |
| Identifier | Identifier | ka (Ms⁻¹) | kd (s⁻¹) | K_{D} (M) | (min) |
| BSPSMA/CD3- | CD3-VH-G | 1.32E+05 | 7.62E−04 | 5.78E−09 | 15.2 |
| 003 | | | | | |
| BSPSMA/CD3- | CD3-VH-G2 | NB | NB | NB | NB |
| 200 | | | | | |
| BSPSMA/CD3- | CD3-VH-G3 | NB | NB | NB | NB |
| 300 | | | | | |
| BSPSMA/CD3- | CD3-VH-G4 | NB | NB | NB | NB |
| 400 | | | | | |
| BSPSMA/CD3- | CD3-VH-G5 | NB | NB | NB | NB |
| 004 | | | | | |
| BSPSMA/CD3- | CD3-VH-G8 | 5.95E+04 | 1.15E−03 | 1.94E−08 | 10.0 |
| 800 | | | | | |
| BSPSMA/CD3- | CD3-VH-G9 | 4.38E+04 | 4.95E−03 | 1.13E−07 | 2.3 |
| 900 | | | | | |
| BSPSMA/CD3- | CD3-VH-G10 | 3.44E+04 | 6.37E−03 | 1.85E−07 | 1.8 |
| 1000 | | | | | |
| BSPSMA/CD3- | CD3-VH-G11 | 9.21E+04 | 1.02E−03 | 1.11E−08 | 11.3 |
| 1100 | | | | | |
| BSPSMA/CD3- | CD3-VH-G12 | 3.85E+04 | 2.47E−03 | 6.42E−08 | 4.7 |
| 1200 | | | | | |
| BSPSMA/CD3- | CD3-VH-G13 | 2.03E+04 | 2.48E−03 | 1.22E−07 | 4.7 |
| 1300 | | | | | |
| BSPSMA/CD3- | CD3-VH-G14 | 6.21E+04 | 3.31E−03 | 5.33E−08 | 3.5 |
| 1400 | | | | | |
| BSPSMA/CD3- | CD3-VH-G15 | 7.36E+04 | 6.11E−03 | 8.29E−08 | 1.9 |
| 1500 | | | | | |
| BSPSMA/CD3- | CD3-VH-G16 | 6.43E+04 | 2.43E−03 | 3.78E−08 | 4.7 |
| 1600 | | | | | |
| BSPSMA/CD3- | CD3-VH-G17 | 4.70E+04 | 3.07E−03 | 6.52E−08 | 3.8 |
| 1700 | | | | | |
| BSPSMA/CD3- | CD3-VH-G18 | NB | NB | NB | NB |
| 1800 | | | | | |
| BSPSMA/CD3- | CD3-VH-G19 | 4.43E+04 | 5.09E−03 | 1.15E−07 | 2.3 |
| 1900 | | | | | |
| BSPSMA/CD3- | CD3-VH-G20 | 1.73E+04 | 5.77E−03 | 3.34E−07 | 2.0 |
| 005 | | | | | |
| BSPSMA/CD3- | CD3-VH-G21 | 3.02E+04 | 2.34E−03 | 7.75E−08 | 4.9 |
| 2100 | | | | | |
| Control 1 | CD3−L2K | 3.68E+05 | 2.66E−03 | 7.22E−09 | 4.3 |

[0253] As shown in Table 7, the anti-CD3×anti-PSMA bispecific antibodies either maintained very weak binding to soluble CD3 in the surface plasmon resonance binding assay, e.g. having a K_{D} value greater than 11 nM up to 334 nM which is weaker than that of the bispecific anti-CD3 arm derived from germline frameworks, CD3-VH-G, or did not exhibit any detectable binding.

[0254] As such, several bispecific antibodies exhibited greater than 50 nM KD values, and some were greater than 100 nM (i.e. BSPSMA/CD3-900, BSPSMA/CD3-1000, BSPSMA/CD3-1900, BSPSMA/CD3-005) and even beyond the detection limit of the assay, i.e. showed no detectable binding to soluble human CD3 (i.e. BSPSMA/CD3-200, BSPSMA/CD3-300, BSPSMA/CD3-400, BSPSMA/CD3-004 and BSPSMA/CD3-1800).

### Example 7: T Cell Activation and Tumor-Specific Cytotoxicity Exhibited by Bispecific Antibodies of the Invention as Measured In Vitro

[0255] In this example, the specific killing of PSMA-expressing target cells in the presence of anti-PSMA×anti-CD3 bispecific antibodies was monitored via flow cytometry. As reported previously, the bispecific antibodies displayed a range of affinity to CD3 protein and CD3-expressing cell lines (i.e. weak, moderate and strong binding). This same panel of bispecific antibodies was tested for the ability to induce naïve human T-cells to re-direct killing toward target-expressing cells.

[0256] Briefly, PSMA-expressing (C4-2, 22Rv1 and TRAMPC2_PSMA) cell lines were labeled with 1 μM of the fluorescent tracking dye Violet Cell Tracker. After labeling, cells were plated overnight at 37° C. Separately, human PBMCs were plated in supplemented RPMI media at 1×10⁶ cells/mL and incubated overnight at 37° C. in order to enrich for lymphocytes by depleting adherent macrophages, dendritic cells, and some monocytes. The next day, target cells were co-incubated with adherent cell-depleted naïve PBMC (Effector/Target cell 4:1 ratio) and a serial dilution of relevant bispecific antibodies or Isotype control (concentration range: 66.7 nM to 0.25 pM) for 48 hours at 37° C. Cells were removed from cell culture plates using an enzyme-free cell dissociation buffer, and analyzed by FACS.

[0257] For FACS analysis, cells were stained with a dead/live far red cell tracker (Invitrogen). 5×10⁵ counting beads were added to each well immediately before FACS analysis. 1×10⁴ beads were collected for each sample. For the assessment of specificity of killing, cells were gated on live Violet labeled populations. Percent of live population was recorded and used for the calculation of normalized survival.

[0258] T cell activation was assessed by incubating cells with directly conjugated antibodies to CD2 and CD69, and by reporting the percent of activated (CD69+) T cells out of total T cells (CD2+).

[0259] As the results in Table 8 show, depletion of PSMA-expressing cells was observed with anti-PSMA×anti-CD3 bispecific antibodies. Most of the tested bispecific antibodies activated and directed human T cells to deplete the target cells with EC₅₀s in picomolar range. Additionally, the observed target-cell lysis was associated with an up-regulation of CD69 cells on CD2+ T cells, with pM EC₅₀S.

[0260] Importantly, the results of this example demonstrate that several bispecifics which utilized a CD3 binding arm that displayed weak-to-non-observable binding to CD3 protein or CD3-expressing cells (i.e. CD3-VH-G5) still retained the ability to activate T-cells and exhibited potent cytotoxicity of tumor antigen-expressing cells.

TABLE 8
Cytotoxicity and T-cell activation properties of selected
PSMAxCD3 Bispecific Antibodies

| | | | 22RV1 | TrampC2. | |
|---|---|---|---|---|---|
| Bispecific | Anti-CD3 | C4-2 Cell | Cell | PSMA | T cell |
| Antibody | Binding | depletion | depletion | Cell depletion | activation |
| Identifier | Arm | EC₅₀ [M] | EC₅₀ [M] | EC₅₀ [M] | EC₅₀ [M] |
| BSPSMA/ | CD3-VH- | 1.03E−11 | NT | 6.43E−12 | 1.23E−12 |
| CD3-003 | G | | | | |
| BSPSMA/ | CD3-VH- | NT | No | NT | No |
| CD3-200 | G2 | | activity | | activity |
| BSPSMA/ | CD3-VH- | NT | Very | NT | 1.85E-11 |
| CD3-300 | G3 | | weak | | |
| BSPSMA/ | CD3-VH- | NT | Very | NT | Very |
| CD3-400 | G4 | | weak | | weak |
| BSPSMA/ | CD3-VH- | 2.15E−11 | 6.31E−12 | 1.15E−11 | 1.34E−11 |
| CD3-004 | G5 | | | | |
| BSPSMA/ | CD3-VH- | NT | NT | 9.27E−12 | 1.76E−12 |
| CD3-800 | G8 | | | | |
| BSPSMA/ | CD3-VH- | NT | NT | 3.50E−12 | 1.12E−12 |
| CD3-900 | G9 | | | | |
| BSPSMA/ | CD3-VH- | NT | NT | 5.97E−12 | 1.28E−12 |
| CD3-1000 | G10 | | | | |
| BSPSMA/ | CD3-VH- | NT | NT | 3.86E−12 | 1.11E−12 |
| CD3-1100 | G11 | | | | |
| BSPSMA/ | CD3-VH- | 8.74E−12 | NT | NT | 2.31E−12 |
| CD3-1300 | G13 | | | | |
| BSPSMA/ | CD3-VH- | 7.37E−12 | 2.07E−12 | NT | 3.89E−12 |
| CD3-1700 | G17 | | | | |
| BSPSMA/ | CD3-VH- | 1.39E−11 | 8.32E−12 | NT | 6.11E−12 |
| CD3-005 | G20 | | | | |

NT = not tested

### Example 8: Anti-PSMA/Anti-CD3 Bispecific Antibodies Display Potent Anti-Tumor Efficacy In Vivo

[0261] To determine the in vivo efficacy of exemplary anti-PSMA/anti-CD3 bispecific antibodies, studies were performed in immunocompromised mice bearing human prostate cancer xenografts. Additional studies were also carried out in immunocompetent mice bearing mouse prostate cancer xenografts engineered to express human PSMA.

### Efficacy of Anti-PSMA/Anti-CD3 Bispecific Antibodies in Human Tumor Xenograft Models

[0262] To assess the in vivo efficacy of the anti-PSMA/anti-CD3 bispecifics in human tumor xenograft studies, NOD scid gamma (NSG) mice (Jackson Laboratories, Bar Harbor, Maine) were co-implanted with human peripheral blood mononuclear cells (PBMCs) along with 22Rv1 or C4-2 human prostate tumor cells which endogenously express PSMA.

[0263] Briefly, 4×10⁶ 22Rv1 or 5×10⁶ C4-2 cells (MD Anderson, TX) cells were co-implanted s.c. with 1×10⁶ human PBMCs (ReachBio, LLC., Seattle, WA) in a 50:50 mix of matrigel matrix (BD Biosciences) into the right flank of male NSG mice. In the 22Rv1 study, mice were treated i.p. on days 0, 3 and 7 with 1 μg of BSPSMA/CD3-001 or an isotype control (FIG. 1). In the C4-2 study, mice were treated i.p. on days 0, 4, and 7 post tumor implantation with 0.1 mg/kg BSPSMA/CD3-001, BSPSMA/CD3-003 or BSPSMA/CD3-005.

[0264] In an additional xenogenic model, anti-PSMA/anti-CD3 bispecifics were tested in mice engrafted with human hematopoietic CD34+ stem cells. Briefly, newborn SIRPα BALB/c-Rag2-IL2rγ-(BRG) pups were engrafted with hCD34+ fetal liver cells. 3-6 months later hCD34-engrafted SIRPα BRG mice were then implanted with C4-2 cells (5×10⁶ s.c. in matrigel). 8 days later, mice were treated with 10 ug of BSPSMA/CD3-004 or an isotype control antibody, followed by 2×/week doses throughout the study.

[0265] In all studies, tumor size was measured 2×/week using calipers and tumor volume calculated as Volume=(length×width²)².

[0266] As the results in Table 9 show, the bispecific antibodies tested in the xenogenic models described above were all effective at inhibiting tumor growth compared to treatment with the isotype control.

### Efficacy of Anti-PSMA/Anti-CD3 Bispecific Antibodies in Established Human Tumor Xenograft Model

[0267] Next, the efficacy of anti-PSMA/anti-CD3 bispecific antibodies in suppressing the growth of established tumors was assessed. NSG mice were first injected with 2.5×10⁶ human PBMCs i.p. to allow for engraftment of human T cells. Fourteen days later, mice were co-implanted with C4-2 cells and PBMCs as above. 20 μg of BSPSMA/CD3-002 or an isotype control were administered i.p. 18 days post tumor implantation and continued 2×/week for the duration of the study. Additional PBMCs were given i.p. on days 20 and 40 post tumor implantation.

[0268] As the results in Table 9 show, BSPSMA/CD3-002 showed efficacy in suppressing the growth of established tumors, decreasing tumor growth by 95%.

### Efficacy of Anti-PSMA/Anti-CD3 Bispecific Antibodies in Immune-Competent Tumor Model

[0269] Additionally, anti-PSMA/anti-CD3 bispecifics were assessed for anti-tumor activity in an immune-competent model. Mice humanized for the three chains (δγε) of CD3 as well as for PSMA were implanted with a variant murine prostate cancer cell line TRAMP-C2 transfected with human PSMA.

[0270] Prior to study initiation, the tumorigenic cell line variant TRAMP-C2_hPSMAv #1 was generated. Briefly, 7.5×10⁶ TRAMP-C2_hPSMA cells were implanted s.c. into the right flank of male mice humanized for CD3 and PSMA. A tumor was excised and cut into 3 mm fragments and subsequently implanted into the right flank of new male humanized mice. A tumor arising from the implanted tumor fragments was then harvested and disaggregated into a single cell suspension. These cells (TRAMP-C2_hPSMAv #1) were then cultured in vitro under G418 selection. 4·10⁶ cells of this variant cell line were then implanted into the right flank of male PSMA/CD3 humanized mice for the bispecific antibody efficacy studies.

[0271] Humanized PSMA/CD3 mice implanted with TRAMPC2_hPSMAv #1 were treated with 100 ug or 10 ug of anti-PSMA/anti-CD3 bispecific antibody BSPSMA/CD3-001 or BSPSMA/CD3-004 or an isotype control 2×/week starting from the day of tumor implantation. Serum cytokine levels 4h post-injection were also examined, as well as spleen T-cell levels. Study was terminated at Day 27.

[0272] As the results in Table 10 show, both anti-PSMA/anti-CD3 bispecific molecules showed efficacy in significantly delaying tumor growth across treatment groups. Dose dependent cytokine release was observed after treatment with BSPSMA/CD3-001. Minimal cytokine release was observed after administration of BSPSMA/CD3-004, possibly due to the weak binding of the anti-CD3. BSPSMA/CD3-001 showed anti-tumor efficacy without depleting T cells in the spleen.

### Efficacy of Anti-PSMA/Anti-CD3 Bispecific Antibodies on Established Tumors in Immune-Competent Model

[0273] Lastly, the efficacy of selected anti-PSMA/anti-CD3 bispecific molecules on reducing growth of established tumors in humanized PSMA/CD3 mice was assessed. TRAMP-C2_hPSMAv #1 cells were transplanted in humanized mice as described above, and 100 ug BSPSMA/CD3-001 or isotype control was administered i.p. 2×/week 14 days after tumor implantation, when tumor sizes ranged from 50 mm³-100 mm³. As the results in Table 11 show, BSPSMA/CD3-001 was efficacious in this established tumor model, displaying an 84% decrease in tumor growth compared to the control group.

[0274] In summary, the anti-PSMA/anti-CD3 bispecific antibodies of this invention display potent anti-tumor efficacy in both immune-compromised and immune-competent tumor models. Additionally, several of the tested bispecific antibodies (BSPSMA/CD3-001 and 002) displayed potent ability to reduce the volume of established tumors.

[0275] Of note, in the absence of PSMA-expressing tumor cells, no T cell activation was seen.

[0276] Additionally, in mice bearing no tumors, blood samples were collected 4 hours following PSMAxCD3 bispecific antibody treatment, and serum cytokine levels were determined. Transient increases in levels of cytokines, namely interferon-gamma (IFN-g), tumor necrosis factor (TNF), interleukin-2 (IL-2), and interleukin-6 (IL-6) were determined and the transient increases were dose-dependent (FIGS. 2A-2D).

[0277] In order to validate the specificity of the bispecific antibodies, mice either humanized for both PSMA and CD3 or mice humanized for CD3 alone were dosed with 100 ug of PSMAxCD3 and examined for serum cytokines (4 hrs post dose) and transient T cell loss from the blood (24 hrs post dose). Treatment with PSMAxCD3 bispecific antibody in a humanized T cell mouse (100 μg/mouse) induces acute increase in cytokines (e.g. IFNg) as well as transient decrease in circulating T cells (FIGS. 3A-3B). This finding reproduces cytokine and T cell changes that have been observed in human patients treated with tumor antigen x CD3 bispecific antibodies.

[0278] PSMAxCD3 bispecific antibodies are efficacious without depleting effector T cells in the spleen of the immunocompetent mice, as shown in FIGS. 4A-4C. Briefly, humanized PSMA and CD3 Velocigene® mice were implanted with hPSMA-expressing tumors and treated with PSMA×CD3 twice weekly. T cells were present at normal numbers at final harvest. Spleens were examined for CD4+ T cells, CD8+ T cells, and Tregs at the end of the experiment after treatment with PSMA×CD3 bispecific antibody twice per week throughout study. Mice humanized for PSMA and CD3 were implanted with TRAMP-C2_hPSMA tumors and dosed from day 0 with 100 ug or 10 ug of PSMA×CD3. Cell populations in the spleen were analyzed by flow cytometry. Data was analyzed using analysis of variance (ANOVA) for any significant effects compared to the isotype control group but no significant differences were found (FIGS. 4A-4C).

TABLE 9
Efficacy of anti-PSMA/anti-CD3 Bispecific Antibodies
in Immune-Compromised Xenograft Models
Xenogenic model: suppression of tumor growth

| Tumor | N | | | Final Tumor |
|---|---|---|---|---|
| Model/ | #mice/ | | | Volume |
| Mouse | treatment | Bispecific Antibody | | (mm³) |
| Strain | group | Identifier | Dose | Mean ± SD |
| 22Rv1/ | 5 | BSPSMA/CD3-001 | 1.0 | 370 ± 270 |
| NSG | 5 | Isotype Control | ug/mouse | 1260 ± 730 |
| | | | on day 0, 3 | |
| | | | & 7 | |
| C4-/2 | 5 | BSPSMA/CD3-001 | 0.1 mg/kg | 0 ± 0 |
| NSG | 5 | BSPSMA/CD3-003 | on day 0, 4 | 0 ± 0 |
| | 5 | BSPSMA/CD3-005 | & 7 | 0 ± 0 |
| | 5 | Isotype Control | | 960 ± 660 |
| C4-2/ | 5 | BSPSMA/CD3-004 | 1.0 | 70 ± 60 |
| SIRPα | | | ug/mouse | |
| Balb/c- | | | 2×/week | |
| Rag2- | | | | |
| IL2rγ- | | | | |
| BRG | | | | |
| engrafted | | | | |
| with | | | | |
| hCD34+ | | | | |
| HSC | | | | |
| | 5 | Isotype Control | | 260 ± 180 |

Xenogenic model: inhibition of established tumor growth

| | | | Tumor | |
|---|---|---|---|---|
| | | | Growth | |
| Tumor | N | | (mm³) from | % Decrease |
| Model/ | # mice/ | Bispecific Antibody | start of | Tumor |
| Mouse | treatment | Identifier | treatment | Growth vs. |
| Strain | group | Dose: 20 ug/ mouse | (mean ± SD) | Control |
| C4-2/ | 5 | BSPSMA/CD3-002 | 60 ± 100 | 95% |
| NSG | 4 | Isotype Control | 1170 ± 600 | (−) |

TABLE 10
Efficacy of anti-PSMA/anti-CD3 Bispecific antibodies in immune-competent syngeneic models

| | | | N | Tumor | | | | | | Spleen T-cell | |
|---|---|---|---|---|---|---|---|---|---|---|---|
| | | Dose | # mice/ | Volume (mm³) | Mean Serum Cytokine | | | | | level %, | |
| Tumor Model/ | Bispecific Antibody | (ug/mouse) | treatment | at Day 27 | Concentrations, (pg/mL) | | | | | (mean ± SD)^{#} | |
| Mouse Strain | Identifier | 2×/week* | group | (Mean ± SD) | IFNg | TNFa | IL-2 | IL-12p70 | IL-6 | CD4+ | CD8+ |
| TRAMP-C2/ | BSPSMA/CD3-001 | 100 | 4 | 260 ± 250 | 130 | 180 | 150 | 70 | 20 | 6.0 ± 1.0 | 13.0 ± 3.0 |
| PSMA^{Hum/hum} | | 10 | 6 | 600 ± 330 | 80 | 140 | 140 | 30 | 1130 | 7.0 ± 2.0 | 14.0 ± 3.0 |
| CD3^{Hum/Hum} | BSPSMA/CD3-004 | 100 | 4 | 50 ± 60 | 30 | 60 | 60 | 40 | 370 | 8.0 ± 1.0 | 12.0 ± 2.0 |
| | | 10 | 5 | 380 ± 650 | 10 | 50 | 50 | 10 | 330 | 8.0 ± 3.0 | 14.0 ± 4.0 |
| | Isotype Control | 100 | 5 | 1740 ± 560 | 4 | 30 | 30 | 10 | 230 | 5.0 ± 1.0 | 8.0 ± 2.0 |

*Mice were dosed with antibody or isotype control 2×/week starting on the day of tumor implantation
^{#}Measured as the percentage of CD4+ or CD8+ cells in spleen out of live mCD45+ cells

TABLE 11
Efficacy of anti-PSMA/anti-CD3 Bispecific antibodies in suppression
of established tumor growth in immune competent syngeneic model
Tumor efficacy in immune-competent model, established tumors

| | Bispecific | Tumor Growth | % Decrease |
|---|---|---|---|
| | Antibody Identifier | (mm³) from start | Tumor |
| Tumor Model/ | Dose: 100 | of treatment | Growth vs. |
| Mouse Strain | ug/mouse | (mean ± SD) | Control |
| TRAMP-C2/ | BSPSMA/CD3-001 | 170 ± 170 | 84 |
| psmA^{Hum/hum} | Isotype Control | 740 ± 570 | (−) |
| CD3^{Hum/Hum} | | | |

### Example 9: Generation of Anti-CD3 Antibodies

[0279] Anti-CD3 antibodies were obtained by immunizing an engineered mouse comprising DNA encoding human Immunoglobulin heavy and kappa light chain variable regions with cells expressing CD3 or with DNA encoding CD3. The antibody immune response was monitored by a CD3-specific immunoassay. When a desired immune response was achieved, splenocytes were harvested and fused with mouse myeloma cells to preserve their viability and form hybridoma cell lines. The hybridoma cell lines were screened and selected to identify cell lines that produce CD3-specific antibodies. Using this technique several anti-CD3 chimeric antibodies (i.e., antibodies possessing human variable domains and mouse constant domains) were obtained. In addition, several fully human anti-CD3 antibodies were isolated directly from antigen-positive B cells without fusion to myeloma cells, as described in US 2007/0280945A1.

[0280] Certain biological properties of the exemplary anti-CD3 antibodies generated in accordance with the methods of this Example are described in detail in the Examples herein.

### Example 10: Heavy and Light Chain Variable Region Amino Acid and Nucleic Acid Sequences

[0281] Table 12 sets forth the amino acid sequence identifiers of the heavy and light chain variable regions and CDRs of selected anti-CD3 antibodies of the invention. The corresponding nucleic acid sequence identifiers are set forth in Table 13. Methods of making the anti-CD3 antibodies disclosed herein can also be found in US publication 2014/0088295.

TABLE 12
Amino Acid Sequence Indentifiers

| Antibody | SEQ ID NOs: | | | | | | | |
|---|---|---|---|---|---|---|---|---|
| Designation | HCVR | HCDR1 | | HCDR3 | LCVR | LCDR11 | LCDR2 | LCDR3 |
| H1H2712N | 154 | 156 | 158 | 160 | 162 | 164 | 166 | 168 |
| H1M2692N | 170 | 172 | 174 | 176 | 178 | 180 | 182 | 184 |
| H1M3542N | 186 | 188 | 190 | 192 | 194 | 196 | 198 | 200 |
| H1M3544N | 202 | 204 | 206 | 208 | 210 | 212 | 214 | 216 |
| H1M3549N | 218 | 220 | 222 | 224 | 226 | 228 | 230 | 232 |
| H1M3613N | 234 | 236 | 238 | 240 | 242 | 244 | 246 | 248 |
| H2M2689N | 250 | 252 | 254 | 256 | 258 | 260 | 262 | 264 |
| H2M2690N | 266 | 268 | 270 | 272 | 274 | 276 | 278 | 280 |
| H2M2691N | 282 | 284 | 286 | 288 | 290 | 292 | 294 | 296 |
| H2M2704N | 298 | 300 | 302 | 304 | 306 | 308 | 310 | 312 |
| H2M2705N | 314 | 316 | 318 | 320 | 322 | 324 | 326 | 328 |
| H2M2706N | 330 | 332 | 334 | 336 | 338 | 340 | 342 | 344 |
| H2M2707N | 346 | 348 | 350 | 352 | 354 | 356 | 358 | 360 |
| H2M2708N | 362 | 364 | 366 | 368 | 370 | 372 | 374 | 376 |
| H2M2709N | 378 | 380 | 382 | 384 | 386 | 388 | 390 | 392 |
| H2M2710N | 394 | 396 | 398 | 400 | 402 | 404 | 406 | 408 |
| H2M2711N | 410 | 412 | 414 | 416 | 418 | 420 | 422 | 424 |
| H2M2774N | 426 | 428 | 430 | 432 | 434 | 436 | 438 | 440 |
| H2M2775N | 442 | 444 | 446 | 448 | 450 | 452 | 454 | 456 |
| H2M2776N | 458 | 460 | 462 | 464 | 466 | 468 | 470 | 472 |
| H2M2777N | 474 | 476 | 478 | 480 | 482 | 484 | 486 | 488 |
| H2M2778N | 490 | 492 | 494 | 496 | 498 | 500 | 502 | 504 |
| H2M2779N | 506 | 508 | 510 | 512 | 514 | 516 | 518 | 520 |
| H2M2789N | 522 | 524 | 526 | 528 | 530 | 532 | 534 | 536 |
| H2M2862N | 538 | 540 | 542 | 544 | 546 | 548 | 550 | 552 |
| H2M2885N | 554 | 556 | 558 | 560 | 562 | 564 | 566 | 568 |
| H2M2886N | 570 | 572 | 574 | 576 | 578 | 580 | 582 | 584 |
| H2M3540N | 586 | 588 | 590 | 592 | 594 | 596 | 598 | 600 |
| H2M3541N | 602 | 604 | 606 | 608 | 610 | 612 | 614 | 616 |
| H2M3543N | 618 | 620 | 622 | 624 | 626 | 628 | 630 | 632 |
| H2M3547N | 634 | 636 | 638 | 640 | 642 | 644 | 646 | 648 |
| H2M3548N | 650 | 652 | 654 | 656 | 658 | 660 | 662 | 664 |
| H2M3563N | 666 | 668 | 670 | 672 | 674 | 676 | 678 | 680 |
| H1H5751P | 682 | 684 | 686 | 688 | 690 | 692 | 694 | 696 |
| H1H5752P | 698 | 700 | 702 | 704 | 706 | 708 | 710 | 712 |
| H1H5753B | 714 | 716 | 718 | 720 | 722 | 724 | 726 | 728 |
| H1H5754B | 730 | 732 | 734 | 736 | 738 | 740 | 742 | 744 |
| H1H5755B | 746 | 748 | 750 | 752 | 754 | 756 | 758 | 760 |
| H1H5756B | 762 | 764 | 766 | 768 | 770 | 772 | 774 | 776 |
| H1H5757B | 778 | 780 | 782 | 784 | 786 | 788 | 790 | 792 |
| H1H5758B | 794 | 796 | 798 | 800 | 802 | 804 | 806 | 808 |
| H1H5761P | 810 | 812 | 814 | 816 | 818 | 820 | 822 | 824 |
| H1H5763P | 826 | 828 | 830 | 832 | 834 | 836 | 838 | 840 |
| H1H5764P | 842 | 844 | 846 | 848 | 850 | 852 | 854 | 856 |
| H1H5769P | 858 | 860 | 862 | 864 | 866 | 868 | 870 | 872 |
| H1H5771P | 874 | 876 | 878 | 880 | 882 | 884 | 886 | 888 |
| H1H5772P | 890 | 892 | 894 | 896 | 898 | 900 | 902 | 904 |
| H1H5777P | 906 | 908 | 910 | 912 | 914 | 916 | 918 | 920 |
| H1H5778P | 922 | 924 | 926 | 928 | 930 | 932 | 934 | 936 |
| H1H5780P | 938 | 940 | 942 | 944 | 946 | 948 | 950 | 952 |
| H1H5781P | 954 | 956 | 958 | 960 | 962 | 964 | 966 | 968 |
| H1H5782P | 970 | 972 | 974 | 976 | 978 | 980 | 982 | 984 |
| H1H5785B | 986 | 988 | 990 | 992 | 994 | 996 | 998 | 1000 |
| H1H5786B | 1002 | 1004 | 1006 | 1008 | 1010 | 1012 | 1014 | 1016 |
| H1H5788P | 1018 | 1020 | 1022 | 1024 | 1026 | 1028 | 1030 | 1032 |
| H1H5790B | 1034 | 1036 | 1038 | 1040 | 1042 | 1044 | 1046 | 1048 |
| H1H5791B | 1050 | 1052 | 1054 | 1056 | 1058 | 1060 | 1062 | 1064 |
| H1H5792B | 1066 | 1068 | 1070 | 1072 | 1074 | 1076 | 1078 | 1080 |
| H1H5793B | 1082 | 1084 | 1086 | 1088 | 1090 | 1092 | 1094 | 1096 |
| H1H5795B | 1098 | 1100 | 1102 | 1104 | 1106 | 1108 | 1110 | 1112 |
| H1H5796B | 1114 | 1116 | 1118 | 1120 | 1122 | 1124 | 1126 | 1128 |
| H1H5797B | 1130 | 1132 | 1134 | 1136 | 1138 | 1140 | 1142 | 1144 |
| H1H5798B | 1146 | 1148 | 1150 | 1152 | 1154 | 1156 | 1158 | 1160 |
| H1H5799P | 1162 | 1164 | 1166 | 1168 | 1170 | 1172 | 1174 | 1176 |
| H1H5801B | 1178 | 1180 | 1182 | 1184 | 1186 | 1188 | 1190 | 1192 |
| H1H7194B | 1194 | 1196 | 1198 | 1200 | 1386 | 1388 | 1390 | 1392 |
| H1H7195B | 1202 | 1204 | 1206 | 1208 | 1386 | 1388 | 1390 | 1392 |
| H1H7196B | 1210 | 1212 | 1214 | 1216 | 1386 | 1388 | 1390 | 1392 |
| H1H7198B | 1218 | 1220 | 1222 | 1224 | 1386 | 1388 | 1390 | 1392 |
| H1H7203B | 1226 | 1228 | 1230 | 1232 | 1386 | 1388 | 1390 | 1392 |
| H1H7204B | 1234 | 1236 | 1238 | 1240 | 1386 | 1388 | 1390 | 1392 |
| H1H7208B | 1242 | 1244 | 1246 | 1248 | 1386 | 1388 | 1390 | 1392 |
| H1H7211B | 1250 | 1252 | 1254 | 1256 | 1386 | 1388 | 1390 | 1392 |
| H1H7221B | 1258 | 1260 | 1262 | 1264 | 1386 | 1388 | 1390 | 1392 |
| H1H7223B | 1266 | 1268 | 1270 | 1272 | 1386 | 1388 | 1390 | 1392 |
| H1H7226B | 1274 | 1276 | 1278 | 1280 | 1386 | 1388 | 1390 | 1392 |
| H1H7232B | 1282 | 1284 | 1286 | 1288 | 1386 | 1388 | 1390 | 1392 |
| H1H7233B | 1290 | 1292 | 1294 | 1296 | 1386 | 1388 | 1390 | 1392 |
| H1H7241B | 1298 | 1300 | 1302 | 1304 | 1386 | 1388 | 1390 | 1392 |
| H1H7242B | 1306 | 1308 | 1310 | 1312 | 1386 | 1388 | 1390 | 1392 |
| H1H7250B | 1314 | 1316 | 1318 | 1320 | 1386 | 1388 | 1390 | 1392 |
| H1H7251B | 1322 | 1324 | 1326 | 1328 | 1386 | 1388 | 1390 | 1392 |
| H1H7254B | 1330 | 1332 | 1334 | 1336 | 1386 | 1388 | 1390 | 1392 |
| H1H7258B | 1338 | 1340 | 1342 | 1344 | 1386 | 1388 | 1390 | 1392 |
| H1H7269B | 1346 | 1348 | 1350 | 1352 | 1386 | 1388 | 1390 | 1392 |
| H1H7279B | 1354 | 1356 | 1358 | 1360 | 1386 | 1388 | 1390 | 1392 |
| H1xH7221G | 1362 | 1364 | 1366 | 1368 | 1386 | 1388 | 1390 | 1392 |
| H1xH7221G3 | 1370 | 1372 | 1374 | 1376 | 1386 | 1388 | 1390 | 1392 |
| H1xH7221G5 | 1378 | 1380 | 1382 | 1384 | 1386 | 1388 | 1390 | 1392 |

TABLE 13
Nucleic Acid Sequence Identifiers

| Antibody | SEQ ID NOs: | | | | | | | |
|---|---|---|---|---|---|---|---|---|
| Designation | HCVR | HCDR1 | HCDR2 | HCDR3 | LCVR | LCDR1 | LCDR2 | LCDR3 |
| H1H2712N | 153 | 155 | 157 | 159 | 161 | 163 | 165 | 167 |
| H1M2692N | 169 | 171 | 173 | 175 | 177 | 179 | 181 | 183 |
| H1M3542N | 185 | 187 | 189 | 191 | 193 | 195 | 197 | 199 |
| H1M3544N | 201 | 203 | 205 | 207 | 209 | 211 | 213 | 215 |
| H1M3549N | 217 | 219 | 221 | 223 | 225 | 227 | 229 | 231 |
| H1M3613N | 233 | 235 | 237 | 239 | 241 | 243 | 245 | 247 |
| H2M2689N | 249 | 251 | 253 | 255 | 257 | 259 | 261 | 263 |
| H2M2690N | 265 | 267 | 269 | 271 | 273 | 275 | 277 | 279 |
| H2M2691N | 281 | 283 | 285 | 287 | 289 | 291 | 293 | 295 |
| H2M2704N | 297 | 299 | 301 | 303 | 305 | 307 | 309 | 311 |
| H2M2705N | 313 | 315 | 317 | 319 | 321 | 323 | 325 | 327 |
| H2M2706N | 329 | 331 | 333 | 335 | 337 | 339 | 341 | 343 |
| H2M2707N | 345 | 347 | 349 | 351 | 353 | 355 | 357 | 359 |
| H2M2708N | 361 | 363 | 365 | 367 | 369 | 371 | 373 | 375 |
| H2M2709N | 377 | 379 | 381 | 383 | 385 | 387 | 389 | 391 |
| H2M2710N | 393 | 395 | 397 | 399 | 401 | 403 | 405 | 407 |
| H2M2711N | 409 | 411 | 413 | 415 | 417 | 419 | 421 | 423 |
| H2M2774N | 425 | 427 | 429 | 431 | 433 | 435 | 437 | 439 |
| H2M2775N | 441 | 443 | 445 | 447 | 449 | 451 | 453 | 455 |
| H2M2776N | 457 | 459 | 461 | 463 | 465 | 467 | 469 | 471 |
| H2M2777N | 473 | 475 | 477 | 479 | 481 | 483 | 485 | 487 |
| H2M2778N | 489 | 491 | 493 | 495 | 497 | 499 | 501 | 503 |
| H2M2779N | 505 | 507 | 509 | 511 | 513 | 515 | 517 | 519 |
| H2M2789N | 521 | 523 | 525 | 527 | 529 | 531 | 533 | 535 |
| H2M2862N | 537 | 539 | 541 | 543 | 545 | 547 | 549 | 551 |
| H2M2885N | 553 | 555 | 557 | 559 | 561 | 563 | 565 | 567 |
| H2M2886N | 569 | 571 | 573 | 575 | 577 | 579 | 581 | 583 |
| H2M3540N | 585 | 587 | 589 | 591 | 593 | 595 | 597 | 599 |
| H2M3541N | 601 | 603 | 605 | 607 | 609 | 611 | 613 | 615 |
| H2M3543N | 617 | 619 | 621 | 623 | 625 | 627 | 629 | 631 |
| H2M3547N | 633 | 635 | 637 | 639 | 641 | 643 | 645 | 647 |
| H2M3548N | 649 | 651 | 653 | 655 | 657 | 659 | 661 | 663 |
| H2M3563N | 665 | 667 | 669 | 671 | 673 | 675 | 677 | 679 |
| H1H5751P | 681 | 683 | 685 | 687 | 689 | 691 | 693 | 695 |
| H1H5752P | 697 | 699 | 701 | 703 | 705 | 707 | 709 | 711 |
| H1H5753B | 713 | 715 | 717 | 719 | 721 | 723 | 725 | 727 |
| H1H5754B | 729 | 731 | 733 | 735 | 737 | 739 | 741 | 743 |
| H1H5755B | 745 | 747 | 749 | 751 | 753 | 755 | 757 | 759 |
| H1H5756B | 761 | 763 | 765 | 767 | 769 | 771 | 773 | 775 |
| H1H5757B | 777 | 779 | 781 | 783 | 785 | 787 | 789 | 791 |
| H1H5758B | 793 | 795 | 797 | 799 | 801 | 803 | 805 | 807 |
| H1H5761P | 809 | 811 | 813 | 815 | 817 | 819 | 821 | 823 |
| H1H5763P | 825 | 827 | 829 | 831 | 833 | 835 | 837 | 839 |
| H1H5764P | 841 | 843 | 845 | 847 | 849 | 851 | 853 | 855 |
| H1H5769P | 857 | 859 | 861 | 863 | 865 | 867 | 869 | 871 |
| H1H5771P | 873 | 875 | 877 | 879 | 881 | 883 | 885 | 887 |
| H1H5772P | 889 | 891 | 893 | 895 | 897 | 899 | 901 | 903 |
| H1H5777P | 905 | 907 | 909 | 911 | 913 | 915 | 917 | 919 |
| H1H5778P | 921 | 923 | 925 | 927 | 929 | 931 | 933 | 935 |
| H1H5780P | 937 | 939 | 941 | 943 | 945 | 947 | 949 | 951 |
| H1H5781P | 953 | 955 | 957 | 959 | 961 | 963 | 965 | 967 |
| H1H5782P | 969 | 971 | 973 | 975 | 977 | 979 | 981 | 983 |
| H1H5785B | 985 | 987 | 989 | 991 | 993 | 995 | 997 | 999 |
| H1H5786B | 1001 | 1003 | 1005 | 1007 | 1009 | 1011 | 1013 | 1015 |
| H1H5788P | 1017 | 1019 | 1021 | 1023 | 1025 | 1027 | 1029 | 1031 |
| H1H5790B | 1033 | 1035 | 1037 | 1039 | 1041 | 1043 | 1045 | 1047 |
| H1H5791B | 1049 | 1051 | 1053 | 1055 | 1057 | 1059 | 1061 | 1063 |
| H1H5792B | 1065 | 1067 | 1069 | 1071 | 1073 | 1075 | 1077 | 1079 |
| H1H5793B | 1081 | 1083 | 1085 | 1087 | 1089 | 1091 | 1093 | 1095 |
| H1H5795B | 1097 | 1099 | 1101 | 1103 | 1105 | 1107 | 1109 | 1111 |
| H1H5796B | 1113 | 1115 | 1117 | 1119 | 1121 | 1123 | 1125 | 1127 |
| H1H5797B | 1129 | 1131 | 1133 | 1135 | 1137 | 1139 | 1141 | 1143 |
| H1H5798B | 1145 | 1147 | 1149 | 1151 | 1153 | 1155 | 1157 | 1159 |
| H1H5799P | 1161 | 1163 | 1165 | 1167 | 1169 | 1171 | 1173 | 1175 |
| H1H5801B | 1177 | 1179 | 1181 | 1183 | 1185 | 1187 | 1189 | 1191 |
| H1H7194B | 1193 | 1195 | 1197 | 1199 | 1385 | 1387 | 1389 | 1391 |
| H1H7195B | 1201 | 1203 | 1205 | 1207 | 1385 | 1387 | 1389 | 1391 |
| H1H7196B | 1209 | 1211 | 1213 | 1215 | 1385 | 1387 | 1389 | 1391 |
| H1H7198B | 1217 | 1219 | 1221 | 1223 | 1385 | 1387 | 1389 | 1391 |
| H1H7203B | 1225 | 1227 | 1229 | 1231 | 1385 | 1387 | 1389 | 1391 |
| H1H7204B | 1233 | 1235 | 1237 | 1239 | 1385 | 1387 | 1389 | 1391 |
| H1H7208B | 1241 | 1243 | 1245 | 1247 | 1385 | 1387 | 1389 | 1391 |
| H1H7211B | 1249 | 1251 | 1253 | 1255 | 1385 | 1387 | 1389 | 1391 |
| H1H7221B | 1257 | 1259 | 1261 | 1263 | 1385 | 1387 | 1389 | 1391 |
| H1H7223B | 1265 | 1267 | 1269 | 1271 | 1385 | 1387 | 1389 | 1391 |
| H1H7226B | 1273 | 1275 | 1277 | 1279 | 1385 | 1387 | 1389 | 1391 |
| H1H7232B | 1281 | 1283 | 1285 | 1287 | 1385 | 1387 | 1389 | 1391 |
| H1H7233B | 1289 | 1291 | 1293 | 1295 | 1385 | 1387 | 1389 | 1391 |
| H1H7241B | 1297 | 1299 | 1301 | 1303 | 1385 | 1387 | 1389 | 1391 |
| H1H7242B | 1305 | 1307 | 1309 | 1311 | 1385 | 1387 | 1389 | 1391 |
| H1H7250B | 1313 | 1315 | 1317 | 1319 | 1385 | 1387 | 1389 | 1391 |
| H1H7251B | 1321 | 1323 | 1325 | 1327 | 1385 | 1387 | 1389 | 1391 |
| H1H7254B | 1329 | 1331 | 1333 | 1335 | 1385 | 1387 | 1389 | 1391 |
| H1H7258B | 1337 | 1339 | 1341 | 1343 | 1385 | 1387 | 1389 | 1391 |
| H1H7269B | 1345 | 1347 | 1349 | 1351 | 1385 | 1387 | 1389 | 1391 |
| H1H7279B | 1353 | 1355 | 1357 | 1359 | 1385 | 1387 | 1389 | 1391 |
| H1xH7221G | 1361 | 1363 | 1365 | 1367 | 1385 | 1387 | 1389 | 1391 |
| H1xH7221G3 | 1369 | 1371 | 1373 | 1375 | 1385 | 1387 | 1389 | 1391 |
| H1xH7221G5 | 1377 | 1379 | 1381 | 1383 | 1385 | 1387 | 1389 | 1391 |

[0282] Antibodies are typically referred to herein according to the following nomenclature: Fc prefix (e.g. “H1H,” “H1M,” “H2M,” etc.), followed by a numerical identifier (e.g. “2712,” “2692,” etc., as shown in Table 1), followed by a “P,” “N,” or “B” suffix. Thus, according to this nomenclature, an antibody may be referred to herein as, e.g., “H1H2712N,” “H1M2692N,” “H2M2689N,” etc. The H1H, H1M and H2M prefixes on the antibody designations used herein indicate the particular Fc region isotype of the antibody. For example, an “H1H” antibody has a human IgG1 Fc, an “H1M” antibody has a mouse IgG1 Fc, and an “H2M” antibody has a mouse IgG2 Fc, (all variable regions are fully human as denoted by the first ‘H’ in the antibody designation). As will be appreciated by a person of ordinary skill in the art, an antibody having a particular Fc isotype can be converted to an antibody with a different Fc isotype (e.g., an antibody with a mouse IgG1 Fc can be converted to an antibody with a human IgG4, etc.), but in any event, the variable domains (including the CDRs)—which are indicated by the numerical identifiers shown in Table 1—will remain the same, and the binding properties are expected to be identical or substantially similar regardless of the nature of the Fc domain.

[0283] Tables 14 and 15 set out the amino acid sequence identifiers for heavy chain variable regions (Table 14) and light chain variable regions (Table 15), and their corresponding CDRs, of additional anti-CD3 HCVRs and LCVRs useful in anti-PSMA×anti-CD3 bispecific antibodies of the invention.

TABLE 14
(Heavy Chain Variable Region Amino Acid Sequences)

| | SEQ ID NOs | | | |
|---|---|---|---|---|
| Heavy Chain Identifier | HCVR | HCDR1 | HCDR2 | HCDR3 |
| CD3-VH-AA | 1394 | 1396 | 1398 | 1400 |
| CD3-VH-B | 1410 | 1412 | 1414 | 1416 |
| CD3-VH-C | 1426 | 1428 | 1430 | 1432 |
| CD3-VH-D | 1442 | 1444 | 1446 | 1448 |
| CD3-VH-E | 1458 | 1460 | 1462 | 1464 |
| CD3-VH-F^{#} | 1473 | 1474 | 1475 | 1476 |

TABLE 15
(Light Chain Variable Region Amino Acid Sequences)

| | SEQ ID NOs | | | |
|---|---|---|---|---|
| Light Chain Identifier | LCVR | LCDR1 | LCDR2 | LCDR3 |
| CD3-VL-AA | 1402 | 1404 | 1406 | 1408 |
| CD3-VL-B | 1418 | 1420 | 1422 | 1424 |
| CD3-VL-C | 1434 | 1436 | 1438 | 1440 |
| CD3-VL-D | 1450 | 1452 | 1454 | 1456 |
| CD3-VL-E | 1466 | 1468 | 1470 | 1472 |
| CD3-VL-F^{#} | 1477 | 1478 | 1479 | 1480 |

[0284] The heavy and light chain variable regions of CD3-VH-F and CD3-VL-F were derived from the anti-CD3 antibody designated “L2K” as set forth in WO2004/106380.

[0285] In addition, Tables 16 and 17 set out the sequence identifiers for the nucleotide sequences encoding the heavy chain variable regions (Table 16) and light chain variable regions (Table 17), and their corresponding CDRs, of additional anti-CD3 HCVRs and LCVRs useful in anti-PSMA×anti-CD3 bispecific antibodies of the invention.

TABLE 16
(Nucleotide Sequences Encoding Heavy Chain Variable Region Sequences)

| | SEQ ID NOs | | | |
|---|---|---|---|---|
| Heavy Chain Identifier | HCVR | HCDR1 | HCDR2 | HCDR3 |
| CD3-VH-AA | 1393 | 1395 | 1397 | 1399 |
| CD3-VH-B | 1409 | 1411 | 1413 | 1415 |
| CD3-VH-C | 1425 | 1427 | 1429 | 1431 |
| CD3-VH-D | 1441 | 1443 | 1445 | 1447 |
| CD3-VH-E | 1457 | 1459 | 1461 | 1463 |

TABLE 17
(Nucleotide Sequences Encoding Light Chain Variable Region Sequences)

| | SEQ ID NOs | | | |
|---|---|---|---|---|
| Light Chain Identifier | LCVR | LCDR1 | LCDR2 | LCDR3 |
| CD3-VL-AA | 1401 | 1403 | 1405 | 1407 |
| CD3-VL-B | 1417 | 1419 | 1421 | 1423 |
| CD3-VL-C | 1433 | 1435 | 1437 | 1439 |
| CD3-VL-D | 1449 | 1451 | 1453 | 1455 |
| CD3-VL-E | 1465 | 1467 | 1469 | 1471 |

### Control Constructs Used in the Following Examples

[0286] Various control constructs (anti-CD3 antibodies) were included in the following experiments for comparative purposes: “OKT-3,” a mouse monoclonal antibody against human T-cell surface antigens available from the American Type Culture Collection (ATCC) under catalog no. CRL-8001; and “SP34,” a commercially available mouse monoclonal antibody obtained, e.g., from Biolegend, San Diego, CA (Cat. No. 302914) or BD Pharmagen, Cat. 55052, reactive against the epsilon chain of the T3 complex on human T lymphocyte cells.

### Example 11: Generation of Additional Anti-CD3 Antibodies

[0287] The following procedures were aimed at identifying antibodies that specifically recognized CD3 (T cell co-receptor) as an antigen.

[0288] A pool of anti-CD3 antibodies were derived from a genetically modified mouse. Briefly, mice were immunized with a CD3 antigen and generated B cells that comprised a diversity of human VH rearrangements in order to express a diverse repertoire of high-affinity antigen-specific antibodies. Antibodies described in Tables 18-21 have the same light chain sequence of Vκ1-39JK5 (LCVR set forth in SEQ ID NO: 1386).

[0289] Generated antibodies were tested for affinity to human and cynomolgus monkey CD3 antigen in an in vitro binding assay, and e.g. one CD3 antibody: designated CD3-VH-P (HCVR set forth in SEQ ID NO: 1634) was identified, amongst a few others, that were found to bind to both human and cynomolgus CD3 having an EC₅₀ between 1 and 40 nM affinity, as determined in a FACS titration of Jurkat cells and cynomolgus T cells, respectively. See, e.g. FACS binding experiments outlined in Example 5.

[0290] The germline amino acid residues of CD3-VH-P were subsequently identified and an antibody designated “CD3-VH-G” was engineered to contain only germline frameworks. Other antibody derivatives were engineered by well-known molecular cloning techniques to replace amino acid residues in a stepwise manner based on differences between the germline sequence and the CD3-VH-P sequence. Each antibody derivative is given a “CD3-VH-G” number designation. See Table 18.

[0291] While CD3-VH-G and some other engineered antibodies retained their binding affinity as seen in the FACS assays, several anti-CD3 antibodies bound to human or cyno CD3 in vitro with weak to no measurable binding affinity, such as 40 nM EC50. Binding affinities, binding kinetics, and other biological properties to elucidate toxicity and pharmacokinetic (pK) profiles were subsequently investigated for bispecific antibodies comprising the exemplary anti-CD3 antibodies generated in accordance with the methods of this Example, are described in detail in the Examples herein.

### Example 12: Heavy and Light Chain Variable Regions (Amino Acid and Nucleic Acid Sequences of the CDRs)

[0292] Table 18 sets forth the amino acid sequence identifiers of the heavy chain variable regions and CDRs of selected anti-CD3 antibodies of the invention. The corresponding nucleic acid sequence identifiers are set forth in Table 19.

[0293] Amino acid and nucleic acid sequences were determined for each antibody heavy chain sequence. Each antibody heavy chain derived from the germline sequence (SEQ ID NO: 1662) was assigned a “G” number designation for consistent nomenclature. Table 2 sets forth the amino acid sequence identifiers of the heavy chain variable regions and CDRs of engineered anti-CD3 antibodies of the invention. The corresponding nucleic acid sequence identifiers are set forth in Table 19. The amino acid and nucleic acid sequence identifiers of the light chain variable region and CDRs are also identified below in Tables 20 and 21, respectively.

TABLE 18
Heavy Chain Amino Acid Sequence Identifiers

| Antibody | | | | |
|---|---|---|---|---|
| CD3-VH | SEQ ID NOs: | | | |
| Designation | HCVR | CDR1 | CDR2 | CDR3 |
| CD3-VH-G | 1482 | 1484 | 1486 | 1488 |
| CD3-VH-G2 | 1490 | 1492 | 1494 | 1496 |
| CD3-VH-G3 | 1498 | 1500 | 1502 | 1504 |
| CD3-VH-G4 | 1506 | 1508 | 1510 | 1512 |
| CD3-VH-G5 | 1514 | 1516 | 1518 | 1520 |
| CD3-VH-G8 | 1522 | 1524 | 1526 | 1528 |
| CD3-VH-G9 | 1530 | 1532 | 1534 | 1536 |
| CD3-VH-G10 | 1538 | 1540 | 1542 | 1544 |
| CD3-VH-G11 | 1546 | 1548 | 1550 | 1552 |
| CD3-VH-G12 | 1554 | 1556 | 1558 | 1560 |
| CD3-VH-G13 | 1562 | 1564 | 1566 | 1568 |
| CD3-VH-G14 | 1570 | 1572 | 1574 | 1576 |
| CD3-VH-G15 | 1578 | 1580 | 1582 | 1584 |
| CD3-VH-G16 | 1586 | 1588 | 1590 | 1592 |
| CD3-VH-G17 | 1594 | 1596 | 1598 | 1600 |
| CD3-VH-G18 | 1602 | 1604 | 1606 | 1608 |
| CD3-VH-G19 | 1610 | 1612 | 1614 | 1616 |
| CD3-VH-G20 | 1618 | 1620 | 1622 | 1624 |
| CD3-VH-G21 | 1626 | 1628 | 1630 | 1632 |
| CD3-VH-P | 1634 | 1636 | 1638 | 1640 |

TABLE 19
Heavy Chain Nucleic Acid Sequence Identifiers

| Antibody | | | | |
|---|---|---|---|---|
| CD3-VH | SEQ ID NOs: | | | |
| Designation | HCVR | CDR1 | CDR2 | CDR3 |
| CD3-VH-G | 1481 | 1483 | 1485 | 1487 |
| CD3-VH-G2 | 1489 | 1491 | 1493 | 1495 |
| CD3-VH-G3 | 1497 | 1499 | 1501 | 1503 |
| CD3-VH-G4 | 1505 | 1507 | 1509 | 1511 |
| CD3-VH-G5 | 1513 | 1515 | 1517 | 1519 |
| CD3-VH-G8 | 1521 | 1523 | 1525 | 1527 |
| CD3-VH-G9 | 1529 | 1531 | 1533 | 1535 |
| CD3-VH-G10 | 1537 | 1539 | 1541 | 1543 |
| CD3-VH-G11 | 1545 | 1547 | 1549 | 1551 |
| CD3-VH-G12 | 1553 | 1555 | 1557 | 1559 |
| CD3-VH-G13 | 1561 | 1563 | 1565 | 1567 |
| CD3-VH-G14 | 1569 | 1571 | 1573 | 1575 |
| CD3-VH-G15 | 1577 | 1579 | 1581 | 1583 |
| CD3-VH-G16 | 1585 | 1587 | 1589 | 1591 |
| CD3-VH-G17 | 1593 | 1595 | 1597 | 1599 |
| CD3-VH-G18 | 1601 | 1603 | 1605 | 1607 |
| CD3-VH-G19 | 1609 | 1611 | 1613 | 1615 |
| CD3-VH-G20 | 1617 | 1619 | 1621 | 1623 |
| CD3-VH-G21 | 1625 | 1627 | 1629 | 1631 |
| CD3-VH-P | 1633 | 1635 | 1637 | 1639 |

TABLE 20
Light Chain Amino Acid Sequence Identifiers

| Antibody | SEQ ID NOs: | | | |
|---|---|---|---|---|
| Designation | LCVR | CDR1 | CDR2 | CDR3 |
| VK1-39JK5 | 1386 | 1388 | 1390 | 1392 |

TABLE 21
Light Chain Nucleic Acid Sequence Identifiers

| Antibody | SEQ ID NOs: | | | |
|---|---|---|---|---|
| Designation | LCVR | CDR1 | CDR2 | CDR3 |
| VK1-39JK5 | 1385 | 1387 | 1389 | 1391 |

[0294] Control 1 antibody designated “CD3-L2K” was constructed based on a known anti-CD3 antibody (i.e., the anti-CD3 antibody “L2K” as set forth in WO2004/106380).

[0295] Isotype Control Antibody, referred to in the Examples herein, is an isotype matched (modified IgG4) antibody that interacts with an irrelevant antigen, i.e. FelD1 antigen.

### Example 13: Surface Plasmon Resonance Derived Binding Affinities and Kinetic Constants of Human Monoclonal Anti-CD3 Antibodies

[0296] Binding affinities and kinetic constants of human monoclonal anti-CD3 antibodies were determined by surface plasmon resonance at 25° C. using either an antibody-capture format (Tables 22, 24, and 26) or an antigen-capture format (Tables 23, 25, and 27). Measurements were conducted on a T200 Biacore™ instrument.

[0297] In the antibody-capture format, the Biacore™ sensor surface was derivatized with a rabbit anti-mouse Fc for hybridoma capture (antibody prefix H1M or H2M) or a mouse anti-human Fc surface for human IgG formatted antibodies (antibody prefix H1H). Soluble heterodimeric CD3 protein (hCD3-epsilon/hCD3-delta; SEQ ID NOs: 1652/1653) with either a human Fc tag (hFcΔAdp/hFc; SEQ ID NOs: 1683/1684) or a mouse Fc tag (mFcΔAdp/mFc; SEQ ID NOs: 1685/1686) was injected over the antibody captured surface and the binding response was recorded. Heterodimeric CD3 protein was purified using the method described in Davis et al. (US2010/0331527).

[0298] In the antigen-capture format, heterodimeric CD3 protein was captured using a rabbit anti-mouse Fc or mouse anti-human Fc and the respective antibodies were injected over the captured antigen.

[0299] Antibodies were analyzed in their conventional divalent format (Tables 22-25) or in a monovalent 1-arm configuration (Tables 26-27) in which the second Fab from the antibody was removed and only the Fc portion (CH2-CH3) was expressed.

[0300] Kinetic association (kₐ) and dissociation (k_{d}) rate constants were determined by processing and fitting the data to a 1:1 binding model using Scrubber 2.0 curve fitting software. Binding dissociation equilibrium constants (K_{D}) and dissociative half-lives (t_{1/2}) were calculated from the kinetic rate constants as: K_{D} (M)=k_{d}/kₐ; and t_{1/2} (min)=(ln 2/(60*k_{d}). NT=not tested; NB=no binding observed.

TABLE 22
Biacore ™ Binding Affinities of Hybridoma mAbs (H1M and H2M)
Binding at 25° C./Antibody-Capture Format

| Antibody | ka (Ms⁻¹) | kd (s⁻¹) | K_{D} (Molar) | T½ (min) |
|---|---|---|---|---|
| H2M2689N | 7.73E+05 | 3.23E−03 | 4.18E−09 | 4 |
| H2M2690N | 9.70E+03 | 2.02E−04 | 2.09E−08 | 57 |
| H2M2691N | 1.03E+04 | 2.07E−04 | 2.01E−08 | 56 |
| H1M2692N | 8.05E+03 | 4.34E−04 | 5.39E−08 | 27 |
| H2M2704N | 3.46E+04 | 6.92E−04 | 2.00E−08 | 17 |
| H2M2705N | 6.62E+04 | 9.10E−04 | 1.37E−08 | 13 |
| H2M2706N | 3.29E+04 | 4.44E−03 | 1.35E−07 | 3 |
| H2M2707N | 2.95E+04 | 1.87E−03 | 6.35E−08 | 6 |
| H2M2708N | 6.94E+04 | 6.12E−04 | 8.82E−09 | 19 |
| H2M2709N | NT | NT | NT | NT |
| H2M2710N | 6.72E+04 | 7.53E−04 | 1.12E−08 | 15 |
| H2M2711N | 6.72E+04 | 7.67E−04 | 1.14E−08 | 15 |
| H1M2712N | 9.32E+03 | 2.19E−04 | 2.35E−08 | 53 |
| H2M2774N | 7.79E+04 | 9.18E−04 | 1.18E−08 | 13 |
| H2M2775N | 6.97E+04 | 6.26E−04 | 8.98E−09 | 18 |
| H2M2776N | 6.29E+04 | 6.39E−04 | 1.02E−08 | 18 |
| H2M2777N | 3.70E+04 | 1.63E−03 | 4.39E−08 | 7 |
| H2M2778N | 2.13E+04 | 1.89E−04 | 8.90E−09 | 61 |
| H2M2779N | 2.18E+04 | 2.28E−04 | 1.05E−08 | 51 |
| H2M2789N | NT | NT | NT | NT |
| H2M2862N | 3.72E+04 | 3.00E−03 | 8.07E−08 | 4 |
| H2M2885N | 6.82E+04 | 6.51E−04 | 9.54E−09 | 18 |
| H2M2886N | 7.29E+04 | 6.53E−04 | 8.96E−09 | 18 |
| H2M3540N | 3.77E+04 | 6.11E−04 | 1.62E−08 | 19 |
| H2M3541N | 7.10E+03 | 1.35E−03 | 1.89E−07 | 9 |
| H1M3542N | 2.37E+04 | 5.08E−04 | 2.14E−08 | 23 |
| H2M3543N | 7.53E+03 | 2.26E−04 | 3.00E−08 | 51 |
| H1M3544N | 9.69E+03 | 1.42E−04 | 1.46E−08 | 82 |
| H2M3547N | 2.18E+04 | 3.47E−04 | 1.59E−08 | 33 |
| H2M3548N | 3.87E+04 | 5.04E−03 | 1.30E−07 | 2 |
| H1M3549N | 1.18E+04 | 9.19E−04 | 7.76E−08 | 13 |
| H2M3563N | 3.24E+04 | 1.19E−04 | 3.66E−09 | 97 |
| H1M3613N | 1.93E+04 | 3.04E−04 | 1.57E−08 | 38 |

TABLE 23
Biacore ™ Binding Affinities of Hybridoma mAbs (H1M and H2M)
Binding at 25° C./Antigen-Capture Format

| Antibody | ka (Ms⁻¹) | kd (s⁻¹) | K_{D} (Molar) | T½ (min) |
|---|---|---|---|---|
| H2M2689N | 1.71E+06 | 9.97E−05 | 5.83E−11 | 116 |
| H2M2690N | 7.51E+04 | 6.35E−06 | 7.99E−11 | 1820 |
| H2M2691N | 3.94E+04 | 9.98E−06 | 2.54E−10 | 1158 |
| H1M2692N | 4.19E+04 | 9.90E−06 | 2.38E−10 | 1167 |
| H2M2704N | 1.32E+06 | 2.48E−04 | 1.87E−10 | 47 |
| H2M2705N | 2.43E+06 | 3.41E−04 | 1.40E−10 | 34 |
| H2M2706N | 5.63E+05 | 3.06E−04 | 5.44E−10 | 38 |
| H2M2707N | 3.99E+05 | 2.85E−04 | 7.15E−10 | 41 |
| H2M2708N | 1.73E+06 | 2.27E−04 | 1.31E−10 | 51 |
| H2M2709N | NT | NT | NT | NT |
| H2M2710N | 1.59E+06 | 2.43E−04 | 1.53E−10 | 48 |
| H2M2711N | 1.59E+06 | 2.40E−04 | 1.51E−10 | 48 |
| H1M2712N | 4.75E+04 | 1.37E−05 | 2.95E−10 | 846 |
| H2M2774N | 2.49E+06 | 3.36E−04 | 1.35E−10 | 34 |
| H2M2775N | 1.56E+06 | 2.16E−04 | 1.38E−10 | 53 |
| H2M2776N | 1.58E+06 | 2.22E−04 | 1.40E−10 | 52 |
| H2M2777N | 5.80E+05 | 3.21E−04 | 5.54E−10 | 36 |
| H2M2778N | 1.50E+05 | 6.57E−06 | 4.68E−11 | 1758 |
| H2M2779N | 1.28E+05 | 1.23E−05 | 9.38E−11 | 941 |
| H2M2789N | NT | NT | NT | NT |
| H2M2862N | 5.91E+05 | 3.21E−04 | 5.41E−10 | 36 |
| H2M2885N | 1.37E+06 | 1.52E−04 | 1.11E−10 | 76 |
| H2M2886N | 1.42E+06 | 1.36E−04 | 9.56E−11 | 85 |
| H2M3540N | 2.55E+06 | 5.87E−04 | 2.31E−10 | 20 |
| H2M3541N | 8.40E+04 | 1.16E−03 | 1.38E−08 | 10 |
| H1M3542N | 4.37E+05 | 2.00E−04 | 4.57E−10 | 58 |
| H2M3543N | 1.22E+05 | 7.96E−05 | 6.53E−10 | 145 |
| H1M3544N | 5.74E+04 | 5.98E−05 | 1.04E−09 | 193 |
| H2M3547N | 4.70E−05 | 1.00E−05 | 2.15E−11 | 1155 |
| H2M3548N | NT | NT | NT | NT |
| H1M3549N | 2.81E+05 | 2.89E−04 | 1.03E−09 | 40 |
| H2M3563N | 6.16E+05 | 4.77E−05 | 7.73E−11 | 242 |
| H1M3613N | 2.20E+05 | 9.60E−05 | 4.35E−10 | 120 |

TABLE 24
Biacore ™ Binding Affinities of Human Fc mAbs (H1H)
Binding at 25° C./Antibody-Capture Format

| Antibody | ka (Ms⁻¹) | kd (s⁻¹) | K_{D} (Molar) | T½ (min) |
|---|---|---|---|---|
| H1H2690N | NT | NT | NT | NT |
| H1H2712N | 3.06E+03 | 2.70E−04 | 8.82E−08 | 43 |
| H1H5751P | 4.01E+03 | 5.18E−04 | 1.29E−07 | 22 |
| H1H5752P | NB | NB | NB | NB |
| H1H5753B | NT | NT | NT | NT |
| H1H5755B | 8.21E+03 | 4.72E−04 | 5.75E−08 | 24 |
| H1H5756B | 8.15E+03 | 2.66E−04 | 3.26E−08 | 43 |
| H1H5757B | 6.63E+03 | 7.85E−04 | 1.18E−07 | 15 |
| H1H5758B | 5.02E+03 | 1.17E−03 | 2.33E−07 | 10 |
| H1H5761P | 4.72E+03 | 2.44E−02 | 5.16E−06 | 0 |
| H1H5763P | 1.85E+04 | 5.40E−02 | 2.92E−06 | 0 |
| H1H5764P | 4.16E+03 | 1.59E−02 | 3.82E−06 | 1 |
| H1H5769P | 7.80E+03 | 9.41E−04 | 1.21E−07 | 12 |
| H1H5771P | 3.00E+04 | 6.26E−04 | 2.09E−08 | 18 |
| H1H5772S | 1.56E+04 | 1.55E−03 | 9.96E−08 | 7 |
| H1H5777P | 1.35E+04 | 3.02E−03 | 2.24E−07 | 4 |
| H1H5778P | 5.52E+03 | 1.54E−04 | 2.78E−08 | 75 |
| H1H5780P | 1.31E+04 | 3.99E−04 | 3.04E−08 | 29 |
| H1H5781P | 8.61E+03 | 4.97E−04 | 5.77E−08 | 23 |
| H1H5782P | NB | NB | NB | NB |
| H1H5785B | NT | NT | NT | NT |
| H1H5786B | 1.26E+04 | 1.08E−03 | 8.54E−08 | 11 |
| H1H5788P | 2.88E+03 | 2.91E−04 | 1.01E−07 | 40 |
| H1H5790B | 1.82E+04 | 5.17E−04 | 2.83E−08 | 22 |
| H1H5791B | 1.09E+04 | 7.90E−04 | 7.25E−08 | 15 |
| H1H5792B | NT | NT | NT | NT |
| H1H5793B | 8.54E+03 | 3.82E−04 | 4.47E−08 | 30 |
| H1H5795B | 1.73E+04 | 5.76E−04 | 3.33E−08 | 20 |
| H1H5796B | 1.47E+04 | 8.91E−04 | 6.05E−08 | 13 |
| H1H5797B | NT | NT | NT | NT |
| H1H5798B | NT | NT | NT | NT |
| H1H5799P | 1.36E+04 | 7.88E−03 | 5.79E−07 | 1 |
| H1H5801B | 6.57E+03 | 1.62E−03 | 2.46E−07 | 7 |
| OKT3 | 2.10E+06 | 2.00E+00 | 1.00E−06 | 0.35 sec |

TABLE 25
Biacore ™ Binding Affinities of Human Fc mAbs (H1H)
Binding at 25° C./Antigen-Capture Format

| Antibody | ka (Ms⁻¹) | kd (s⁻¹) | K_{D} (Molar) | T½ (min) |
|---|---|---|---|---|
| H1H2690N | NT | NT | NT | NT |
| H1H2712N | 8.93E+04 | 8.68E−05 | 9.71E−10 | 133 |
| H1H5751P | 7.24E+04 | 2.47E−04 | 3.42E−09 | 47 |
| H1H5752P | NB | NB | NB | NB |
| H1H5753B | NT | NT | NT | NT |
| H1H5755B | 2.15E+05 | 2.01E−04 | 9.36E−10 | 57 |
| H1H5756B | 1.44E+05 | 1.11E−04 | 7.67E−10 | 105 |
| H1H5757B | 1.80E+05 | 2.95E−04 | 1.64E−09 | 39 |
| H1H5758B | 1.42E+05 | 5.62E−04 | 3.97E−09 | 21 |
| H1H5761P | 2.11E+05 | 1.13E−02 | 5.34E−08 | 1 |
| H1H5763P | 1.84E+05 | 1.70E−02 | 9.24E−08 | 1 |
| H1H5764P | 3.50E+05 | 7.36E−03 | 2.10E−08 | 2 |
| H1H5769P | 1.19E+05 | 5.23E−04 | 4.41E−09 | 22 |
| H1H5771P | 9.23E+05 | 3.42E−04 | 3.71E−10 | 34 |
| H1H5772S | 5.19E+05 | 8.69E−04 | 1.67E−09 | 13 |
| H1H5777P | 4.83E+05 | 1.70E−03 | 3.52E−09 | 7 |
| H1H5778P | 3.99E+05 | 3.42E−05 | 8.56E−11 | 338 |
| H1H5780P | 4.78E+05 | 1.71E−04 | 3.58E−10 | 68 |
| H1H5781P | 1.40E+05 | 2.68E−04 | 1.92E−09 | 43 |
| H1H5782P | NB | NB | NB | NB |
| H1H5785B | NT | NT | NT | NT |
| H1H5786B | 3.00E+06 | 4.24E−04 | 1.41E−10 | 27 |
| H1H5788P | 7.06E+04 | 1.64E−04 | 2.33E−09 | 70 |
| H1H5790B | 9.25E+05 | 2.36E−04 | 2.54E−10 | 49 |
| H1H5791B | 7.86E+05 | 3.40E−04 | 4.33E−10 | 34 |
| H1H5792B | NT | NT | NT | NT |
| H1H5793B | 4.78E+05 | 1.59E−04 | 3.33E−10 | 73 |
| H1H5795B | 1.58E+06 | 2.29E−04 | 1.45E−10 | 50 |
| H1H5796B | 1.05E+05 | 2.44E−04 | 2.32E−09 | 47 |
| H1H5797B | NT | NT | NT | NT |
| H1H5798B | NT | NT | NT | NT |
| H1H5799P | 7.18E+05 | 5.64E−03 | 7.85E−09 | 2 |
| H1H5801B | 3.31E+05 | 1.12E−03 | 3.38E−09 | 10 |
| OKT3 | 3.94E+06 | 2.18E−02 | 5.53E−09 | 0.5 |

TABLE 26
Biacore ™ Binding Affinities of monovalent 1-arm mAbs
Binding at 25° C./Antibody-Capture Format

| Antibody | ka (Ms⁻¹) | kd (s⁻¹) | K_{D} (Molar) | T½ (min) |
|---|---|---|---|---|
| H1H7194P | 1.16E+04 | 1.51E−04 | 1.30E−08 | 76 |
| H1H7195P | 3.13E+04 | 9.89E−05 | 3.16E−09 | 117 |
| H1H7196P | 1.07E+04 | 4.43E−04 | 4.13E−08 | 26 |
| H1H7198P | 2.63E+04 | 1.58E−04 | 6.02E−09 | 73 |
| H1H7203P | 1.46E+04 | 2.67E−04 | 1.83E−08 | 43 |
| H1H7204P | 1.43E+04 | 3.62E−04 | 2.53E−08 | 32 |
| H1H7208P | NT | NT | NT | NT |
| H1H7211P | 1.41E+04 | 1.59E−04 | 1.13E−08 | 73 |
| H1H7221P | 1.07E+04 | 2.92E−04 | 2.75E−08 | 40 |
| H1H7223P | 1.60E+04 | 3.07E−04 | 1.92E−08 | 38 |
| H1H7226P | 1.30E+04 | 3.55E−04 | 2.72E−08 | 33 |
| H1H7232P | 8.03E+03 | 1.77E−03 | 2.20E−07 | 7 |
| H1H7233P | 1.11E+04 | 2.69E−04 | 2.42E−08 | 43 |
| H1H7241P | 1.34E+04 | 2.95E−04 | 2.20E−08 | 39 |
| H1H7242P | 2.15E+04 | 6.64E−04 | 3.09E−08 | 17 |
| H1H7250P | 2.34E+04 | 2.47E−04 | 1.05E−08 | 47 |
| H1H7251P | 2.56E+04 | 1.07E−03 | 4.17E−08 | 11 |
| H1H7254P | 2.60E+04 | 3.88E−04 | 1.49E−08 | 30 |
| H1H7258P | 1.26E+04 | 3.02E−04 | 2.40E−08 | 38 |
| H1H7269P | 2.57E+04 | 6.24E−03 | 2.43E−07 | 2 |
| H1H7279P | NB | NB | NB | NB |
| H1xH7221G | NT | NT | NT | NT |
| H1xH7221G3 | NB | NB | NB | NB |
| H1xH7221G5 | NB | NB | NB | NB |

TABLE 27
Biacore ™ Binding Affinities of monovalent 1-arm mAbs
Binding at 25° C./Antigen-Capture Format

| Antibody | ka (Ms⁻¹) | kd (s⁻¹) | K_{D} (Molar) | T½ (min) |
|---|---|---|---|---|
| H1H7194P | 3.50E+05 | 8.43E−05 | 2.41E−10 | 137 |
| H1H7195P | 5.66E+05 | 7.14E−05 | 1.26E−10 | 162 |
| H1H7196P | 1.85E+05 | 4.61E−04 | 2.49E−09 | 25 |
| H1H7198P | 6.28E+05 | 7.07E−05 | 1.12E−10 | 163 |
| H1H7203P | 4.79E+05 | 2.38E−04 | 4.98E−10 | 48 |
| H1H7204P | 1.73E+05 | 3.65E−04 | 2.12E−09 | 32 |
| H1H7208P | NT | NT | NT | NT |
| H1H7211P | 3.45E+05 | 9.61E−05 | 2.79E−10 | 120 |
| H1H7221P | 1.36E+05 | 2.39E−04 | 1.75E−09 | 48 |
| H1H7223P | 1.87E+05 | 2.86E−04 | 1.53E−09 | 40 |
| H1H7226P | 4.18E+05 | 2.36E−04 | 5.65E−10 | 49 |
| H1H7232P | 1.49E+05 | 1.49E−03 | 1.00E−08 | 8 |
| H1H7233P | 1.61E+05 | 2.04E−04 | 1.27E−09 | 57 |
| H1H7241P | 1.87E+05 | 2.36E−04 | 1.26E−09 | 49 |
| H1H7242P | 3.83E+05 | 1.01E−03 | 2.63E−09 | 11 |
| H1H7250P | 2.31E+05 | 1.89E−04 | 8.20E−10 | 61 |
| H1H7251P | 4.47E+05 | 1.19E−03 | 2.67E−09 | 10 |
| H1H7254P | 4.33E+05 | 3.30E−04 | 7.62E−10 | 35 |
| H1H7258P | 1.33E+05 | 2.90E−04 | 2.18E−09 | 40 |
| H1H7269P | 2.77E+05 | 6.89E−03 | 2.49E−08 | 2 |
| H1H7279P | NB | NB | NB | NB |
| H1xH7221G | NT | NT | NT | NT |
| H1xH7221G3 | NB | NB | NB | NB |
| H1xH7221G5 | NB | NB | NB | NB |

[0301] As shown in Tables 22-27, Several anti-CD3 antibodies of the present invention bind CD3, in either antibody-capture or antigen-capture formats, with high affinity.

### Example 14: Anti-CD3 Antibodies Bind and Proliferate Human T-Cells

[0302] Anti-CD3 antibodies of the present invention were tested for their ability to bind to human T-cells and induce their proliferation. Binding was assessed using Jurkat cells (a CD3+human T-cell line), while proliferation of Peripheral Blood Mononuclear Cells (PBMC) was assessed using ATP catalyzed quantification (CellTiter Glo®). Anti-CD3 antibody OKT3 acted as a positive control and irrelevant isotype matched antibodies served as negative controls.

[0303] FACS data was acquired using the following protocol: Cells at 2×10⁵ per well were incubated with serially diluted antibodies for 30 min on ice. Post incubation, cells were washed and secondary antibody was added and incubated for an additional 30 minutes. After incubation, cells were washed, re-suspended in cold PBS containing 1% BSA and analyzed by flow cytometry with viable Jurkat cells gated by side and forward scatters. The EC₅₀s for cell binding titration were determined using Prism software with values calculated using a 4-parameter non-linear regression analysis.

[0304] Proliferation data was acquired using the following protocol: Human PBMC (5×10⁴/well) were incubated with a 3-fold serial dilution of anti-CD3 and a fixed concentration of a commercial anti-CD28 antibody (200 ng/ml) in 96 well plates for 72 h at 37° C. Following incubation, CellTiter Glo® was added and luminescence was measured using a VICTOR X5 multi-label plate reader (PerkinElmer). The EC₅₀ of cell viability (ATP catalyzed quantification) was calculated using a 4-parameter non-linear regression analysis in GraphPad Prism.

[0305] Results of the binding and proliferation experiments are summarized in Tables 28-30.

TABLE 28
Hybridoma Anti-CD3 mAbs Bind & Proliferate Human T-Cells

| | EC₅₀ [M] | EC₅₀ [M] hPBMC |
|---|---|---|
| Antibody | FACS JURKAT | Proliferation |
| H2M2689N | NB | 0.00E+00 |
| H2M2690N | 4.37E−09 | 5.37E−12 |
| H2M2691N | 6.77E−09 | 3.43E−11 |
| H1M2692N | 5.99E−09 | 1.42E−10 |
| H2M2704N | 8.45E−10 | 2.93E−12 |
| H2M2705N | 2.96E−10 | 1.76E−11 |
| H2M2706N | 2.37E−09 | 3.86E−12 |
| H2M2707N | 1.24E−07 | 1.92E−12 |
| H2M2708N | 6.58E−10 | 2.69E−08 |
| H2M2709N | 7.11E−10 | 2.48E−11 |
| H2M2710N | 7.10E−10 | 2.11E−10 |
| H2M2711N | 1.16E−09 | 6.48E−10 |
| H1M2712N | 2.19E−08 | 1.28E−10 |
| H2M2774N | 3.52E−10 | 4.92E−10 |
| H2M2775N | 1.32E−09 | 1.09E−09 |
| H2M2776N | 4.91E−10 | 2.84E−11 |
| H2M2777N | 2.16E−09 | 2.51E−11 |
| H2M2778N | 3.62E−09 | 0.00E+00 |
| H2M2779N | NT | 0.00E+00 |
| H2M2789N | NT | 2.85E−08 |
| H2M2862N | 7.68E−09 | 6.72E−13 |
| H2M2885N | 2.09E−09 | 2.49E−12 |
| H2M2886N | 3.97E−09 | 2.69E−12 |
| H2M3540N | 3.99E−09 | 3.16E−12 |
| H2M3541N | 3.70E−09 | 6.40E−12 |
| H1M3542N | 2.01E−09 | 0.00E+00 |
| H2M3543N | 5.63E−09 | 6.12E−12 |
| H1M3544N | 2.32E−08 | 0.00E+00 |
| H2M3547N | 2.71E−09 | 5.02E−12 |
| H2M3548N | 1.10E−09 | 1.89E−12 |
| H1M3549N | 2.30E−09 | 0.00E+00 |
| H2M3563N | 1.07E−09 | 7.74E−12 |
| H1M3613N | 1.03E−08 | 0.00E+00 |
| Isotype Ctrl | NB | 0.00E+00 |

NB: No Binding;
NT: Not Tested

TABLE 29
Human Fc Anti-CD3 mAbs Bind &
Proliferate Human T-Cells

| | EC₅₀ [M] | EC₅₀ [M] hPBMC |
|---|---|---|
| Antibody | FACS JURKAT | Proliferation |
| H1H5751P | 2.12E−09 | 9.29E−12 |
| H1H5752P | 3.43E−10 | 1.09E−12 |
| H1H5753B | NB | 9.14E−11 |
| H1H5755B | 1.23E−09 | 4.24E−12 |
| H1H5756B | NB | 0.00E+00 |
| H1H5757B | 3.38E−09 | 4.86E−12 |
| H1H5758B | 1.90E−09 | 2.13E−12 |
| H1H5761P | 2.10E−09 | 3.62E−13 |
| H1H5763P | 2.76E−09 | 3.11E−13 |
| H1H5764P | 8.80E−10 | 3.27E−13 |
| H1H5769P | 4.10E−09 | 6.17E−12 |
| H1H5771P | NT | 6.35E−12 |
| H1H5772S | 6.64E−10 | 4.42E−12 |
| H1H5777P | 5.71E−10 | 3.04E−12 |
| H1H5778P | 6.85E−10 | 5.04E−12 |
| H1H5780P | 7.62E−10 | 3.44E−12 |
| H1H5781P | 1.23E−09 | 6.08E−12 |
| H1H5782P | NB | 5.17E−12 |
| H1H5785B | NB | 0.00E+00 |
| H1H5786B | 1.10E−09 | 1.79E−12 |
| H1H5788P | 3.53E−09 | 4.62E−12 |
| H1H5790B | 3.55E−09 | 2.71E−12 |
| H1H5791B | 3.77E−09 | 1.75E−12 |
| H1H5792B | 5.87E−09 | 6.47E−12 |
| H1H5793B | 4.62E−09 | 3.28E−12 |
| H1H5795B | 2.04E−09 | 3.09E−12 |
| H1H5796B | 9.82E−09 | 4.37E−12 |
| H1H5797B | 3.96E−08 | 1.07E−11 |
| H1H5798B | 5.57E−09 | 2.59E−12 |
| H1H5799P | NT | 1.63E−13 |
| H1H5801B | 1.55E−08 | 1.09E−12 |
| OKT3 | 1.96E−10 | 3.30E−13 |
| Isotype Ctrl | NB | 0.00E+00 |

NB: No Binding;
NT: Not Tested

TABLE 30
Monovalent 1-arm Anti-CD3 mAbs Bind &
Proliferate Human T-Cells

| | EC₅₀ [M] | EC₅₀ [M] hPBMC |
|---|---|---|
| Antibody | FACS JURKAT | Proliferation |
| H1H7194P | 1.50E−09 | 2.37E−12 |
| H1H7195P | 3.42E−10 | 2.42E−12 |
| H1H7196P | 3.44E−08 | 1.27E−12 |
| H1H7198P | 7.26E−10 | 2.55E−12 |
| H1H7203P | 3.24E−09 | 1.64E−12 |
| H1H7204P | 2.29E−09 | 1.51E−12 |
| H1H7208P | 5.19E−08 | 1.46E−12 |
| H1H7211P | 7.01E−10 | 2.75E−12 |
| H1H7221P | 1.40E−09 | 2.60E−12 |
| H1H7223P | 9.37E−10 | 1.07E−12 |
| H1H7226P | 7.95E−10 | 9.52E−13 |
| H1H7232P | 1.50E−09 | 1.03E−12 |
| H1H7233P | 7.15E−10 | 7.34E−13 |
| H1H7241P | 1.01E−09 | 1.05E−12 |
| H1H7242P | 1.83E−09 | 2.13E−12 |
| H1H7250P | 1.37E−09 | 2.43E−12 |
| H1H7251P | 1.45E−09 | 1.30E−12 |
| H1H7254P | 1.09E−09 | 2.80E−12 |
| H1H7258P | 1.07E−09 | 2.17E−12 |
| H1H7269P | 1.95E−09 | 1.15E−12 |
| H1H7279P | NB | 0.00E+00 |
| Isotype Ctrl | NB | 0.00E+00 |

NB: No Binding;
NT: Not Tested

[0306] As shown in Tables 7-9, the vast majority of anti-CD3 antibodies of the invention bound human T-cells and induced T-cell proliferation.

### Example 15: Anti-CD3 Antibodies Bind and Proliferate Monkey T-Cells

[0307] A subset of anti-CD3 antibodies of the invention was tested for the ability to bind to and induce proliferation of monkey T-cells.

[0308] FACS data was acquired using the following protocol: Cells at 2×10⁵ per well were incubated with serially diluted antibodies for 30 min on ice. Post incubation, cells were washed and secondary antibodies were added and incubated for an additional 30 minutes. After incubation, cells were washed, re-suspended in cold PBS containing 1% BSA and analyzed by flow cytometry. CD4+ monkey T cells were gated by side and forward scatters, and on the CD2+CD4+CD20− population. The EC₅₀s for cell binding titration were calculated using a 4-parameter non-linear regression analysis in GraphPad Prism.

[0309] Proliferation data was acquired using the following protocol: Freshly isolated cynomolgus monkey derived PBMC (5×10⁴/well) were incubated with a 3-fold serial dilution of anti-CD3 antibody and a fixed concentration of a commercial anti-CD28 antibody (500 ng/ml) antibody in 96 well plates for 72 h at 37° C. Following incubation, CellTiter Glo® was added and luminescence was measured using a VICTOR X5 multi-label plate reader (PerkinElmer). The EC₅₀ of cell viability (ATP catalyzed quantification) was calculated using a 4-parameter non-linear regression analysis in GraphPad Prism.

[0310] Results of the binding and proliferation experiments are summarized in Tables 31 and 32.

TABLE 31
Anti-CD3 mAbs Bind & Proliferate monkey PBMCs

| | EC50 [M] | EC50 [M] mfPBMC |
|---|---|---|
| Antibody | FACS PBMCs | Proliferation |
| H1H2690N | 5.66E−09 | 2.71E−12 |
| H1H2712N | 2.29E−09 | 2.72E−12 |
| H2M3547N | 1.12E−10 | NT |
| H2M3563N | 1.65E−10 | NT |
| H1H5761P | NT | 2.81E−09 |
| H1H5763P | NT | 0.00E+00 |
| H1H5764P | NT | 4.06E−10 |
| H1H5769P | NT | 8.33E−13 |
| H1H5771P | NT | 2.74E−12 |
| H1H5772S | NT | 1.47E−12 |
| H1H5778P | NT | 5.93E−13 |
| H1H5780P | NT | 3.13E−13 |
| H1H5781P | NT | 7.92E−13 |
| H1H5788P | NT | 2.01E−12 |
| OKT3 | NB | NT |
| SP34 | 7.03E−11 | 1.71E−12 |

NB: No Binding;
NT: not tested

TABLE 32
Monovalent 1-arm Anti-CD3 mAbs Bind &
Proliferate Monkey PBMCs

| | EC50 [M] | EC50 [M] mfPBMC |
|---|---|---|
| Antibody | FACS PBMCs | Proliferation |
| H1H7194P | NT | 4.84E−12 |
| H1H7195P | NT | 1.36E−12 |
| H1H7196P | NT | 1.40E−08 |
| H1H7198P | NT | 2.29E−12 |
| H1H7203P | NT | 4.97E−13 |
| H1H7204P | NT | 1.26E−11 |
| H1H7208P | NT | 7.02E−12 |
| H1H7211P | NT | 2.81E−13 |
| H1H7221P | NT | 1.72E−12 |
| H1H7223P | NT | 6.75E−11 |
| H1H7226P | NT | 2.26E−11 |
| H1H7232P | NT | 4.90E−11 |
| H1H7233P | NT | 4.35E−12 |
| H1H7241P | NT | 2.05E−11 |
| H1H7242P | NT | 1.38E−11 |
| H1H7250P | NT | 7.27E−11 |
| H1H7251P | NT | 1.83E−11 |
| H1H7254P | NT | 8.88E−11 |
| H1H7258P | NT | 1.11E−11 |

NB: No Binding;
NT: not tested

[0311] As shown in Tables 31 and 32, several anti-CD3 antibodies of the invention bound CD2+CD4+ monkey T-cells and induced their proliferation. OKT3 did not drive monkey PBMC proliferation, while SP34 was active against monkey PBMCs.

### Example 16: Anti-CD3 mAbs Support T-Cell-Mediated Killing of Tumor Cells

[0312] The ability of anti-CD3 antibodies to redirect T-cell mediated killing via Fc/FcR interactions was studied using a calcein based U937 killing assay. Briefly, human PBMC were isolated over FICOLL-PAQUE™ and activated over a course of several days with media containing human IL-2 (30 U/ml) and T-cell activation beads (anti-CD3/CD28). U937 cells were labeled with calcein, and then incubated with activated T-cells at a 10:1 effector: target ratio using 3-fold serial dilutions of antibodies over a course of 3 hours at 37° C. Following incubation, the plates were centrifuged and supernatants were transferred to a translucent black clear bottom plate for fluorescence analysis. EC₅₀ values, defined as the molar concentration of CD3 antibody that induces 50% cytotoxicity, were calculated using a 4-parameter non-linear regression analysis in GraphPad Prism. Results using hybridoma antibodies, human Fc antibodies, and monovalent one-arm antibodies are shown in Tables 33, 34 and 35, respectively.

TABLE 33
Hybridoma Anti-CD3 mAbs Redirect
T-Cell Killing to U937 Cells

| | U937 Cytotoxicity |
|---|---|
| Antibody | Human T-cells [M] |
| H2M2689N | 0.00E+00 |
| H2M2690N | 2.79E−11 |
| H2M2691N | 2.34E−11 |
| H1M2692N | 3.59E−10 |
| H2M2704N | 2.49E−12 |
| H2M2705N | 1.73E−12 |
| H2M2706N | 7.91E−12 |
| H2M2707N | 7.21E−12 |
| H2M2708N | 3.27E−12 |
| H2M2709N | 3.47E−12 |
| H2M2710N | 3.97E−12 |
| H2M2711N | 3.66E−12 |
| H1M2712N | 3.14E−10 |
| H2M2774N | 2.46E−12 |
| H2M2775N | 3.38E−12 |
| H2M2776N | 4.06E−12 |
| H2M2777N | 4.86E−12 |
| H2M2778N | 0.00E+00 |
| H2M2779N | 6.75E−10 |
| H2M2789N | NT |
| H2M2862N | 7.66E−12 |
| H2M2885N | 3.71E−12 |
| H2M2886N | 8.06E−12 |
| H2M3540N | 1.25E−11 |
| H2M3541N | 5.39E−11 |
| H1M3542N | 2.92E−11 |
| H2M3543N | 1.31E−11 |
| H1M3544N | 1.72E−10 |
| H2M3547N | 3.17E−11 |
| H2M3548N | 5.50E−12 |
| H1M3549N | 1.07E−10 |
| H2M3563N | 4.05E−11 |
| H1M3613N | 8.66E−10 |
| Isotype Ctrl | 0.00E+00 |

NT: Not Tested

TABLE 34
Human Fc formatted Anti-CD3 mAbs
Redirect T-Cell Killing to U937 Cells

| | U937 Cytotoxicity |
|---|---|
| Antibody | Human T-cells [M] |
| H1H5751P | 1.30E−10 |
| H1H5752P | 1.85E−11 |
| H1H5753B | 3.79E−10 |
| H1H5755B | 5.16E−11 |
| H1H5756B | 7.69E−11 |
| H1H5757B | 9.65E−11 |
| H1H5758B | 8.86E−08 |
| H1H5761P | 2.00E−12 |
| H1H5763P | NT |
| H1H5764P | NT |
| H1H5769P | 5.65E−11 |
| H1H5771P | NT |
| H1H5772S | 6.89E−13 |
| H1H5777P | 4.87E−13 |
| H1H5778P | 3.41E−13 |
| H1H5780P | 4.03E−12 |
| H1H5781P | 1.83E−12 |
| H1H5782P | 5.18E−12 |
| H1H5785B | 4.43E−11 |
| H1H5786B | 6.10E−11 |
| H1H5788P | 1.54E−11 |
| H1H5790B | 8.71E−11 |
| H1H5791B | 8.01E−11 |
| H1H5792B | 1.40E−10 |
| H1H5793B | 8.85E−11 |
| H1H5795B | 6.74E−11 |
| H1H5796B | 5.03E−10 |
| H1H5797B | 5.76E−10 |
| H1H5798B | 1.81E−10 |
| H1H5799P | NT |
| H1H5801B | 9.23E−11 |
| OKT3 | 2.35E−12 |
| Isotype Ctrl | 0.00E+00 |

NT: Not Tested

TABLE 35
Monovalent 1-arm Anti-CD3 mAb
Redirect T-Cell Killing to U937 Cells

| | U937 Cytotoxicity |
|---|---|
| Antibody | Human T-cells [M] |
| H1H7194P | 4.71E−12 |
| H1H7195P | 6.10E−12 |
| H1H7196P | 1.96E−11 |
| H1H7198P | 5.21E−12 |
| H1H7203P | 5.47E−12 |
| H1H7204P | 1.08E−11 |
| H1H7208P | 4.59E−11 |
| H1H7211P | 7.89E−12 |
| H1H7221P | 9.21E−12 |
| H1H7223P | 5.30E−12 |
| H1H7226P | 1.04E−11 |
| H1H7232P | 9.96E−12 |
| H1H7233P | 1.19E−11 |
| H1H7241P | 1.23E−11 |
| H1H7242P | 7.50E−12 |
| H1H7250P | 5.91E−12 |
| H1H7251P | 1.81E−12 |
| H1H7254P | 4.18E−12 |
| H1H7258P | 1.53E−11 |
| H1H7269P | 1.08E−11 |
| H1H7279P | 0.00E+00 |
| Isotype Ctrl | 0.00E+00 |

NT: Not Tested

[0313] As shown in Tables 33-35, most anti-CD3 antibodies, as well as OKT3, supported redirected T-cell mediated killing in this assay system. The observed killing, believed to be dependent on the antibody's Fc engagement with the Fc Receptor on U937 cells leading to clustering of CD3 on adjacent T-cells, was squelched by addition of non-specific human IgG (data not shown).

[0314] The present invention is not to be limited in scope by the specific embodiments described herein. Indeed, various modifications of the invention in addition to those described herein will become apparent to those skilled in the art from the foregoing description. Such modifications are intended to fall within the scope of the appended claims.

TABLE 36
Sequences Excluded from ST.26-Formatted Sequence
Listing

| SEQ ID NO: | Sequence |
|---|---|
| 133 | ggtgcatcc |
| 134 | GAS |
| 149 | actgcatcc |
| 150 | TAS |
| 165 | ggtgcatcc |
| 166 | GAS |
| 181 | ggtgcatcc |
| 182 | GAS |
| 197 | gctgcatcc |
| 198 | AAS |
| 213 | ggtgcatcc |
| 214 | GAS |
| 229 | gctgcatcc |
| 230 | AAS |
| 245 | gctgcatcc |
| 246 | AAS |
| 261 | gatgcatcc |
| 262 | DAS |
| 277 | ggtgcatcc |
| 278 | GAS |
| 293 | ggtgcatcc |
| 294 | GAS |
| 309 | ggtgcatcc |
| 310 | GAS |
| 325 | ggtgcatcc |
| 326 | GAS |
| 341 | ggtgcatcc |
| 342 | GAS |
| 357 | ggtgcatcc |
| 358 | GAS |
| 373 | ggtgcatcc |
| 374 | GAS |
| 389 | ggtgcatcc |
| 390 | GAS |
| 405 | ggtgcatcc |
| 406 | GAS |
| 421 | ggtgcatcc |
| 422 | GAS |
| 437 | ggtgcatcc |
| 438 | GAS |
| 453 | ggtgcaacc |
| 454 | GAT |
| 469 | ggtgcaacc |
| 470 | GAT |
| 485 | ggtgcatcc |
| 486 | GAS |
| 501 | ggtgcatcc |
| 502 | GAS |
| 517 | tgggcatct |
| 518 | WAS |
| 533 | gctgcatcc |
| 534 | AAS |
| 549 | ggtgcatcc |
| 550 | GAS |
| 565 | ggtgcaacc |
| 566 | GAT |
| 581 | ggtgcaacc |
| 582 | GAT |
| 597 | gctgcatcc |
| 598 | AAS |
| 613 | gctgcatcc |
| 614 | AAS |
| 629 | gctgcatcc |
| 630 | AAS |
| 645 | gctgcatcc |
| 646 | AAS |
| 661 | gctgcatcc |
| 662 | AAS |
| 677 | gctgcatcc |
| 678 | AAS |
| 693 | gctgcttcc |
| 694 | AAS |
| 709 | gaagcttct |
| 710 | EAS |
| 725 | gctgtatcc |
| 726 | AVS |
| 741 | gatgcatcc |
| 742 | DAS |
| 757 | gctgcatcc |
| 758 | AAS |
| 773 | gctgcatcc |
| 774 | AAS |
| 789 | gctgcatcc |
| 790 | AAS |
| 805 | gctgcatcc |
| 806 | AAS |
| 821 | gctgcatcc |
| 822 | AAS |
| 837 | gctgcgtcc |
| 838 | AAS |
| 853 | gctgcatcc |
| 854 | AAS |
| 869 | ggtgcgtcc |
| 870 | GAS |
| 885 | ggtgcgtcc |
| 886 | GAS |
| 901 | ggtgcgtcc |
| 902 | GAS |
| 917 | ggtgcgtcc |
| 918 | GAS |
| 933 | ggtgcatcc |
| 934 | GAS |
| 949 | ggtgcgtcc |
| 950 | GAS |
| 965 | ggtgcgtcc |
| 966 | GAS |
| 981 | aaggcgtct |
| 982 | KAS |
| 997 | tgggcatct |
| 998 | WAS |
| 1013 | actgcatcc |
| 1014 | TAS |
| 1029 | ggtgcatcc |
| 1030 | GAS |
| 1045 | actgcatcc |
| 1046 | TAS |
| 1061 | actgcatcc |
| 1062 | TAS |
| 1077 | actgcatcc |
| 1078 | TAS |
| 1093 | gttgcatcc |
| 1094 | VAS |
| 1109 | actgcatcc |
| 1110 | TAS |
| 1125 | gctgcatcc |
| 1126 | AAS |
| 1141 | gttgcatcc |
| 1142 | VAS |
| 1157 | actgcatcc |
| 1158 | TAS |
| 1173 | actgcatcc |
| 1174 | TAS |
| 1189 | gttgcatcc |
| 1190 | VAS |
| 1389 | gctgcatcc |
| 1390 | AAS |
| 1405 | ggtgcatcc |
| 1406 | GAS |
| 1421 | ggtgcatcc |
| 1422 | GAS |
| 1437 | ggtgcatcc |
| 1438 | GAS |
| 1453 | ggtgcatcc |
| 1454 | GAS |
| 1469 | ggtgcatcc |
| 1470 | GAS |
| 1479 | DTS |
| 1645 | actgcatcc |
| 1646 | TAS |

The application's sequence listing, which the Patent Office published only in electronic form, follows.

SEQUENCE LISTING (1686 sequences)

SEQ ID NO: 1 - DNA, 351 bp, synthetic construct
  misc_feature 1..351: note = synthetic
  source 1..351: mol_type = other DNA
gagtttcaggtggtggagtctgggggaggcctggtcaagcctggggggtccctcagactctcctgtgtggtctccggattcaccttcagtaactataatatgaactgggtccgccaggctccagcgaagggactggagtgggtctcatccattagtactggtagtagtgacatttactacgcagactcagtgaagggccgattcaccatctccagagacaacgccaagaactcactgtatctgcaaatgaacagcctgagagtcgaggacacggctgtttattactgtgcgagagatataattggaactacgagggactggggccagggaaccctggtcaccgtctcctca

SEQ ID NO: 2 - protein, 117 aa, synthetic construct
  REGION 1..117: note = synthetic
EFQVVESGGGLVKPGGSLRLSCVVSGFTFSNYNMNWVRQAPAKGLEWVSSISTGSSDIYYADSVKGRFTISRDNAKNSLYLQMNSLRVEDTAVYYCARDIIGTTRDWGQGTLVTVSS

SEQ ID NO: 3 - DNA, 24 bp, synthetic construct
  misc_feature 1..24: note = synthetic
  source 1..24: mol_type = other DNA
ggattcaccttcagtaactataat

SEQ ID NO: 4 - protein, 8 aa, synthetic construct
  REGION 1..8: note = synthetic
GFTFSNYN

SEQ ID NO: 5 - DNA, 24 bp, synthetic construct
  misc_feature 1..24: note = synthetic
  source 1..24: mol_type = other DNA
attagtactggtagtagtgacatt

SEQ ID NO: 6 - protein, 8 aa, synthetic construct
  REGION 1..8: note = synthetic
ISTGSSDI

SEQ ID NO: 7 - DNA, 30 bp, synthetic construct
  misc_feature 1..30: note = synthetic
  source 1..30: mol_type = other DNA
gcgagagatataattggaactacgagggac

SEQ ID NO: 8 - protein, 10 aa, synthetic construct
  REGION 1..10: note = synthetic
ARDIIGTTRD

SEQ ID NO: 9 - DNA, 372 bp, synthetic construct
  misc_feature 1..372: note = synthetic
  source 1..372: mol_type = other DNA
caggtgcagctggtggagtctgggggaggcgtggtccagcctgggaggtccctgagactctcctgtgcagcctctggattcaccttcagcagctatggcatgcactgggtccgccaacctccaggcaagggactggagtgggtggctattatgtcatatgatggaagtaataaatactatgcagattccgtgaagggccgattcaccatctccagagacaattccaagaacacgctgtatctgcagatgaatagcctgagagttgaggacacggctgtgtattactgtgcgaaagatcaatattacgattttttgacttttgactatacccttgactactggggccagggaaccctggtcaccgtctcctca

SEQ ID NO: 10 - protein, 124 aa, synthetic construct
  REGION 1..124: note = synthetic
QVQLVESGGGVVQPGRSLRLSCAASGFTFSSYGMHWVRQPPGKGLEWVAIMSYDGSNKYYADSVKGRFTISRDNSKNTLYLQMNSLRVEDTAVYYCAKDQYYDFLTFDYTLDYWGQGTLVTVSS

SEQ ID NO: 11 - DNA, 24 bp, synthetic construct
  misc_feature 1..24: note = synthetic
  source 1..24: mol_type = other DNA
ggattcaccttcagcagctatggc

SEQ ID NO: 12 - protein, 8 aa, synthetic construct
  REGION 1..8: note = synthetic
GFTFSSYG

SEQ ID NO: 13 - DNA, 24 bp, synthetic construct
  misc_feature 1..24: note = synthetic
  source 1..24: mol_type = other DNA
atgtcatatgatggaagtaataaa

SEQ ID NO: 14 - protein, 8 aa, synthetic construct
  REGION 1..8: note = synthetic
MSYDGSNK

SEQ ID NO: 15 - DNA, 51 bp, synthetic construct
  misc_feature 1..51: note = synthetic
  source 1..51: mol_type = other DNA
gcgaaagatcaatattacgattttttgacttttgactatacccttgactac

SEQ ID NO: 16 - protein, 17 aa, synthetic construct
  REGION 1..17: note = synthetic
AKDQYYDFLTFDYTLDY

SEQ ID NO: 17 - DNA, 366 bp, synthetic construct
  misc_feature 1..366: note = synthetic
  source 1..366: mol_type = other DNA
caggtgcagctggtggagtctgggggaggcgtggtccagcctgggaggtccctaagactctcctgtgcagcgtctggattctccttcagtggctatggcatgcactgggtccgccaggctccaggcaaggggctggagtgggtggcagttacatggtatgatggaagtaataaatactatgcagactccgtgaagggccgattcaccatctccagagacaattccaagaacacgctgtatctacaaatgaacagcctgagagccgaggacacggctgtgtattactgtgcgagagatggaaactgggggggtccctactggtacttcgatctctggggccgtggcaccctggtcaccgtctcctca

SEQ ID NO: 18 - protein, 122 aa, synthetic construct
  REGION 1..122: note = synthetic
QVQLVESGGGVVQPGRSLRLSCAASGFSFSGYGMHWVRQAPGKGLEWVAVTWYDGSNKYYADSVKGRFTISRDNSKNTLYLQMNSLRAEDTAVYYCARDGNWGGPYWYFDLWGRGTLVTVSS

SEQ ID NO: 19 - DNA, 24 bp, synthetic construct
  misc_feature 1..24: note = synthetic
  source 1..24: mol_type = other DNA
ggattctccttcagtggctatggc

SEQ ID NO: 20 - protein, 8 aa, synthetic construct
  REGION 1..8: note = synthetic
GFSFSGYG

SEQ ID NO: 21 - DNA, 24 bp, synthetic construct
  misc_feature 1..24: note = synthetic
  source 1..24: mol_type = other DNA
acatggtatgatggaagtaataaa

SEQ ID NO: 22 - protein, 8 aa, synthetic construct
  REGION 1..8: note = synthetic
TWYDGSNK

SEQ ID NO: 23 - DNA, 45 bp, synthetic construct
  misc_feature 1..45: note = synthetic
  source 1..45: mol_type = other DNA
gcgagagatggaaactgggggggtccctactggtacttcgatctc

SEQ ID NO: 24 - protein, 15 aa, synthetic construct
  REGION 1..15: note = synthetic
ARDGNWGGPYWYFDL

SEQ ID NO: 25 - DNA, 372 bp, synthetic construct
  misc_feature 1..372: note = synthetic
  source 1..372: mol_type = other DNA
caggtgcagctggtggagtctgggggaggcgtggtccagcctgggaggtccctgagactctcctgtgcagcctctggattcaccttcagtagctatggcatgcactgggtccgccaggctccaggcaaggggctggagtgggtggcagttatatcatatgctggaaataataaatactatgtagactccgtgaagggccgattcaccatctccagagacaattccaagaacacgctgtatctgcaaatgaacagcctgagagctgaggacacggctgtgtattactgtgcgaaagatccgtattacgattttttgactggttcggactactttgactactggggccagggaaccctggtcaccgtctcctca

SEQ ID NO: 26 - protein, 124 aa, synthetic construct
  REGION 1..124: note = synthetic
QVQLVESGGGVVQPGRSLRLSCAASGFTFSSYGMHWVRQAPGKGLEWVAVISYAGNNKYYVDSVKGRFTISRDNSKNTLYLQMNSLRAEDTAVYYCAKDPYYDFLTGSDYFDYWGQGTLVTVSS

SEQ ID NO: 27 - DNA, 24 bp, synthetic construct
  misc_feature 1..24: note = synthetic
  source 1..24: mol_type = other DNA
ggattcaccttcagtagctatggc

SEQ ID NO: 28 - protein, 8 aa, synthetic construct
  REGION 1..8: note = synthetic
GFTFSSYG

SEQ ID NO: 29 - DNA, 24 bp, synthetic construct
  misc_feature 1..24: note = synthetic
  source 1..24: mol_type = other DNA
atatcatatgctggaaataataaa

SEQ ID NO: 30 - protein, 8 aa, synthetic construct
  REGION 1..8: note = synthetic
ISYAGNNK

SEQ ID NO: 31 - DNA, 51 bp, synthetic construct
  misc_feature 1..51: note = synthetic
  source 1..51: mol_type = other DNA
gcgaaagatccgtattacgattttttgactggttcggactactttgactac

SEQ ID NO: 32 - protein, 17 aa, synthetic construct
  REGION 1..17: note = synthetic
AKDPYYDFLTGSDYFDY

SEQ ID NO: 33 - DNA, 372 bp, synthetic construct
  misc_feature 1..372: note = synthetic
  source 1..372: mol_type = other DNA
caggtgcagctggtggagtctgggggaggcgtggtccagcctgggaggtccctgagactctcctgtgcagcgtctggattcaccttcagtagctatggcatgcactgggtccgccaggctccaggcaaggggctggagtgggtggcagttatatggtatgatggaaataataaatactatgcagactccgtgaagggccgattcaccatctccagagacaattccaagaagacgctgtatctgcaaatgaccagcctgagagccgaggacacggctgtgtattactgtgcgagagatcagtattacgatattttgactgctgataacacccttgactactggggccagggaaccctggtcaccgtctcctca

SEQ ID NO: 34 - protein, 124 aa, synthetic construct
  REGION 1..124: note = synthetic
QVQLVESGGGVVQPGRSLRLSCAASGFTFSSYGMHWVRQAPGKGLEWVAVIWYDGNNKYYADSVKGRFTISRDNSKKTLYLQMTSLRAEDTAVYYCARDQYYDILTADNTLDYWGQGTLVTVSS

SEQ ID NO: 35 - DNA, 24 bp, synthetic construct
  misc_feature 1..24: note = synthetic
  source 1..24: mol_type = other DNA
ggattcaccttcagtagctatggc

SEQ ID NO: 36 - protein, 8 aa, synthetic construct
  REGION 1..8: note = synthetic
GFTFSSYG

SEQ ID NO: 37 - DNA, 24 bp, synthetic construct
  misc_feature 1..24: note = synthetic
  source 1..24: mol_type = other DNA
atatggtatgatggaaataataaa

SEQ ID NO: 38 - protein, 8 aa, synthetic construct
  REGION 1..8: note = synthetic
IWYDGNNK

SEQ ID NO: 39 - DNA, 51 bp, synthetic construct
  misc_feature 1..51: note = synthetic
  source 1..51: mol_type = other DNA
gcgagagatcagtattacgatattttgactgctgataacacccttgactac

SEQ ID NO: 40 - protein, 17 aa, synthetic construct
  REGION 1..17: note = synthetic
ARDQYYDILTADNTLDY

SEQ ID NO: 41 - DNA, 375 bp, synthetic construct
  misc_feature 1..375: note = synthetic
  source 1..375: mol_type = other DNA
caggtgcagctggtggagtctgggggaggcgtggtccagcctgggaggtccctgagactctcctgtgcagcctctggattcaccttcattagttatggcatgcactgggtccgccaggctccaggcaaggggctggagtgggtggcagttatatcatatgatggaagtaataaatactatgcagactccgtgaagggccgattcaccatctccagagacaattccaagaacacgctgtttctgcaaatgaacagcctgagagctgaggacacggctgtgtattactgtgcgaagaattacgatttttggaatggctatgttggctactacggtatggacgtctggggccaagggaccacggtcaccgtctcctca

SEQ ID NO: 42 - protein, 125 aa, synthetic construct
  REGION 1..125: note = synthetic
QVQLVESGGGVVQPGRSLRLSCAASGFTFISYGMHWVRQAPGKGLEWVAVISYDGSNKYYADSVKGRFTISRDNSKNTLFLQMNSLRAEDTAVYYCAKNYDFWNGYVGYYGMDVWGQGTTVTVSS

SEQ ID NO: 43 - DNA, 24 bp, synthetic construct
  misc_feature 1..24: note = synthetic
  source 1..24: mol_type = other DNA
ggattcaccttcattagttatggc

SEQ ID NO: 44 - protein, 8 aa, synthetic construct
  REGION 1..8: note = synthetic
GFTFISYG

SEQ ID NO: 45 - DNA, 24 bp, synthetic construct
  misc_feature 1..24: note = synthetic
  source 1..24: mol_type = other DNA
atatcatatgatggaagtaataaa

SEQ ID NO: 46 - protein, 8 aa, synthetic construct
  REGION 1..8: note = synthetic
ISYDGSNK

SEQ ID NO: 47 - DNA, 54 bp, synthetic construct
  misc_feature 1..54: note = synthetic
  source 1..54: mol_type = other DNA
gcgaagaattacgatttttggaatggctatgttggctactacggtatggacgtc

SEQ ID NO: 48 - protein, 18 aa, synthetic construct
  REGION 1..18: note = synthetic
AKNYDFWNGYVGYYGMDV

SEQ ID NO: 49 - DNA, 351 bp, synthetic construct
  misc_feature 1..351: note = synthetic
  source 1..351: mol_type = other DNA
gaggtgcagctggtggagtctgggggaggcttggtccagcctggggggtccctgagactctcctgtgtagtctctggattcacctttaataactattggatgagttgggtccgccaggctccagggaaggggctggagtgggtggccaacataaagaaagatggaagtgagaaatattatgtggactctgtgaagggccgattcaccatctccagagacaacgccaagaactcactgtatttgcaaatgaacagcctgagagccgaggacacggctgtatattactgtgcgagggatataatggctacgattatagactggggccagggaaccctggtcaccgtctcctca

SEQ ID NO: 50 - protein, 117 aa, synthetic construct
  REGION 1..117: note = synthetic
EVQLVESGGGLVQPGGSLRLSCVVSGFTFNNYWMSWVRQAPGKGLEWVANIKKDGSEKYYVDSVKGRFTISRDNAKNSLYLQMNSLRAEDTAVYYCARDIMATIIDWGQGTLVTVSS

SEQ ID NO: 51 - DNA, 24 bp, synthetic construct
  misc_feature 1..24: note = synthetic
  source 1..24: mol_type = other DNA
ggattcacctttaataactattgg

SEQ ID NO: 52 - protein, 8 aa, synthetic construct
  REGION 1..8: note = synthetic
GFTFNNYW

SEQ ID NO: 53 - DNA, 24 bp, synthetic construct
  misc_feature 1..24: note = synthetic
  source 1..24: mol_type = other DNA
ataaagaaagatggaagtgagaaa

SEQ ID NO: 54 - protein, 8 aa, synthetic construct
  REGION 1..8: note = synthetic
IKKDGSEK

SEQ ID NO: 55 - DNA, 30 bp, synthetic construct
  misc_feature 1..30: note = synthetic
  source 1..30: mol_type = other DNA
gcgagggatataatggctacgattatagac

SEQ ID NO: 56 - protein, 10 aa, synthetic construct
  REGION 1..10: note = synthetic
ARDIMATIID

SEQ ID NO: 57 - DNA, 369 bp, synthetic construct
  misc_feature 1..369: note = synthetic
  source 1..369: mol_type = other DNA
caggtgcagctggtggagtccgggggaggcgtggtccagcctgggaggtccctgagactctcctgtgcagcctctggattcccctttaatagttatggcatgcactgggtccgccaggctccaggcaaggggctggagtgggtggcagttatctcatatgatggaagtaatagatactatgcagactccgtgaagggccgattcaccatctccagagacaattccaagtacacgttggatctacacgtgagcagcctgacaactgatgacacggctgtttattactgtgcgcgagatcggagatatgggaagtgggaacaactctaccctgactacttgggccagggaaccctggtcaccgtctcctca

SEQ ID NO: 58 - protein, 123 aa, synthetic construct
  REGION 1..123: note = synthetic
QVQLVESGGGVVQPGRSLRLSCAASGFPFNSYGMHWVRQAPGKGLEWVAVISYDGSNRYYADSVKGRFTISRDNSKYTLDLHVSSLTTDDTAVYYCARDRRYGKWEQLYPDYLGQGTLVTVSS

SEQ ID NO: 59 - DNA, 24 bp, synthetic construct
  misc_feature 1..24: note = synthetic
  source 1..24: mol_type = other DNA
ggattcccctttaatagttatggc

SEQ ID NO: 60 - protein, 8 aa, synthetic construct
  REGION 1..8: note = synthetic
GFPFNSYG

SEQ ID NO: 61 - DNA, 24 bp, synthetic construct
  misc_feature 1..24: note = synthetic
  source 1..24: mol_type = other DNA
atctcatatgatggaagtaataga

SEQ ID NO: 62 - protein, 8 aa, synthetic construct
  REGION 1..8: note = synthetic
ISYDGSNR

SEQ ID NO: 63 - DNA, 48 bp, synthetic construct
  misc_feature 1..48: note = synthetic
  source 1..48: mol_type = other DNA
gcgcgagatcggagatatgggaagtgggaacaactctaccctgactac

SEQ ID NO: 64 - protein, 16 aa, synthetic construct
  REGION 1..16: note = synthetic
ARDRRYGKWEQLYPDY

SEQ ID NO: 65 - DNA, 372 bp, synthetic construct
  misc_feature 1..372: note = synthetic
  source 1..372: mol_type = other DNA
caggtgcagctggtggagtctgggggaggcgtggtccagcctgggaggtccctgagactctcctgtgcagcctctggattcaccttcagtagctatggcatgcactgggtccgccaggctccaggcaaggggctggagtgggtggcagtcatttcatatgctggaaacaataaatactatgcagactccgtgaaaggccgattcaccgtttccagagacaattcgaagaaaacattgtatctgcaaatgaacagcctgagatctgaggacacggctgtgtattactgtgcgaaagattcgtattatgattttttgactgatcccgatgttttggatatctggggccaagggacaatggtcaccgtctcttca

SEQ ID NO: 66 - protein, 124 aa, synthetic construct
  REGION 1..124: note = synthetic
QVQLVESGGGVVQPGRSLRLSCAASGFTFSSYGMHWVRQAPGKGLEWVAVISYAGNNKYYADSVKGRFTVSRDNSKKTLYLQMNSLRSEDTAVYYCAKDSYYDFLTDPDVLDIWGQGTMVTVSS

SEQ ID NO: 67 - DNA, 24 bp, synthetic construct
  misc_feature 1..24: note = synthetic
  source 1..24: mol_type = other DNA
ggattcaccttcagtagctatggc

SEQ ID NO: 68 - protein, 8 aa, synthetic construct
  REGION 1..8: note = synthetic
GFTFSSYG

SEQ ID NO: 69 - DNA, 24 bp, synthetic construct
  misc_feature 1..24: note = synthetic
  source 1..24: mol_type = other DNA
atttcatatgctggaaacaataaa

SEQ ID NO: 70 - protein, 8 aa, synthetic construct
  REGION 1..8: note = synthetic
ISYAGNNK

SEQ ID NO: 71 - DNA, 51 bp, synthetic construct
  misc_feature 1..51: note = synthetic
  source 1..51: mol_type = other DNA
gcgaaagattcgtattatgattttttgactgatcccgatgttttggatatc

SEQ ID NO: 72 - protein, 17 aa, synthetic construct
  REGION 1..17: note = synthetic
AKDSYYDFLTDPDVLDI

SEQ ID NO: 73 - DNA, 351 bp, synthetic construct
  misc_feature 1..351: note = synthetic
  source 1..351: mol_type = other DNA
gaggtgcagctggtggagtctgggggaggcttggtccagtcgggggggtccctgagactctcctgtgaagcctctggattcacctttagtaactactggatgacctggatccgccagggtccagggaaggggctggaatgggtggccaacataaagccagatggaacggaaaattactatgtggactctgtgaagggccgattcaccatttccagagacaacgccaggaactcactgtatctacaaatgaccagcctgaaagccgaagacacggctgtgtattattgtgggagaatgatacaattcgtcattaatatttggggccagggaaccctggtcaccgtctcctca

SEQ ID NO: 74 - protein, 117 aa, synthetic construct
  REGION 1..117: note = synthetic
EVQLVESGGGLVQSGGSLRLSCEASGFTFSNYWMTWIRQGPGKGLEWVANIKPDGTENYYVDSVKGRFTISRDNARNSLYLQMTSLKAEDTAVYYCGRMIQFVINIWGQGTLVTVSS

SEQ ID NO: 75 - DNA, 24 bp, synthetic construct
  misc_feature 1..24: note = synthetic
  source 1..24: mol_type = other DNA
ggattcacctttagtaactactgg

SEQ ID NO: 76 - protein, 8 aa, synthetic construct
  REGION 1..8: note = synthetic
GFTFSNYW

SEQ ID NO: 77 - DNA, 24 bp, synthetic construct
  misc_feature 1..24: note = synthetic
  source 1..24: mol_type = other DNA
ataaagccagatggaacggaaaat

SEQ ID NO: 78 - protein, 8 aa, synthetic construct
  REGION 1..8: note = synthetic
IKPDGTEN

SEQ ID NO: 79 - DNA, 30 bp, synthetic construct
  misc_feature 1..30: note = synthetic
  source 1..30: mol_type = other DNA
gggagaatgatacaattcgtcattaatatt

SEQ ID NO: 80 - protein, 10 aa, synthetic construct
  REGION 1..10: note = synthetic
GRMIQFVINI

SEQ ID NO: 81 - DNA, 372 bp, synthetic construct
  misc_feature 1..372: note = synthetic
  source 1..372: mol_type = other DNA
caggtgcagctggtggagtctgggggaggcgtggtccagcctgggaggtccctgagactctcctgtgcagcctctggattcaccttcagaagctatggcatgcactgggtccgccaggctccaggcaaggggctggagtgggtggcatttatatcatatgatgaaagtaataaacaccaagcagactccgtgaagggccgattcaccatctccagagacaattccaagaacacgctgtatctgcaaatgaacagcctgagagctgaggacacggctgtgtatttctgtgcgaaagatcaatattacgattttttgactgcttatgatacccttgattactggggccagggaaccctggtcaccgtctcctca

SEQ ID NO: 82 - protein, 124 aa, synthetic construct
  REGION 1..124: note = synthetic
QVQLVESGGGVVQPGRSLRLSCAASGFTFRSYGMHWVRQAPGKGLEWVAFISYDESNKHQADSVKGRFTISRDNSKNTLYLQMNSLRAEDTAVYFCAKDQYYDFLTAYDTLDYWGQGTLVTVSS

SEQ ID NO: 83 - DNA, 24 bp, synthetic construct
  misc_feature 1..24: note = synthetic
  source 1..24: mol_type = other DNA
ggattcaccttcagaagctatggc

SEQ ID NO: 84 - protein, 8 aa, synthetic construct
  REGION 1..8: note = synthetic
GFTFRSYG

SEQ ID NO: 85 - DNA, 24 bp, synthetic construct
  misc_feature 1..24: note = synthetic
  source 1..24: mol_type = other DNA
atatcatatgatgaaagtaataaa

SEQ ID NO: 86 - protein, 8 aa, synthetic construct
  REGION 1..8: note = synthetic
ISYDESNK

SEQ ID NO: 87 - DNA, 51 bp, synthetic construct
  misc_feature 1..51: note = synthetic
  source 1..51: mol_type = other DNA
gcgaaagatcaatattacgattttttgactgcttatgatacccttgattac

SEQ ID NO: 88 - protein, 17 aa, synthetic construct
  REGION 1..17: note = synthetic
AKDQYYDFLTAYDTLDY

SEQ ID NO: 89 - DNA, 372 bp, synthetic construct
  misc_feature 1..372: note = synthetic
  source 1..372: mol_type = other DNA
caggtgcagctggtggagtctgggggaggcgtggtccagcctgggaggtccctgagactctcctgtgcagcctctggattcaccttcagtagctatggcatgcactgggtccgccaggctccaggcaaggggctggagtgggtgacatttatatcatatgatggaaataataaatactattcagactccgtgaagggccgattcgccatctccagagacaattccaagaacacactttatctgcaaatgaacagtctgagagctgaggacacgtctgtgtatttctgtgcgaaagatcagtattacgattttttgactgatttcggggtctttgactactggggccagggaaccctggtcaccgtctcctca

SEQ ID NO: 90 - protein, 124 aa, synthetic construct
  REGION 1..124: note = synthetic
QVQLVESGGGVVQPGRSLRLSCAASGFTFSSYGMHWVRQAPGKGLEWVTFISYDGNNKYYSDSVKGRFAISRDNSKNTLYLQMNSLRAEDTSVYFCAKDQYYDFLTDFGVFDYWGQGTLVTVSS

SEQ ID NO: 91 - DNA, 24 bp, synthetic construct
  misc_feature 1..24: note = synthetic
  source 1..24: mol_type = other DNA
ggattcaccttcagtagctatggc

SEQ ID NO: 92 - protein, 8 aa, synthetic construct
  REGION 1..8: note = synthetic
GFTFSSYG

SEQ ID NO: 93 - DNA, 24 bp, synthetic construct
  misc_feature 1..24: note = synthetic
  source 1..24: mol_type = other DNA
atatcatatgatggaaataataaa

SEQ ID NO: 94 - protein, 8 aa, synthetic construct
  REGION 1..8: note = synthetic
ISYDGNNK

SEQ ID NO: 95 - DNA, 51 bp, synthetic construct
  misc_feature 1..51: note = synthetic
  source 1..51: mol_type = other DNA
gcgaaagatcagtattacgattttttgactgatttcggggtctttgactac

SEQ ID NO: 96 - protein, 17 aa, synthetic construct
  REGION 1..17: note = synthetic
AKDQYYDFLTDFGVFDY

SEQ ID NO: 97 - DNA, 372 bp, synthetic construct
  misc_feature 1..372: note = synthetic
  source 1..372: mol_type = other DNA
caggtgcagctggtggagtctgggggaggcgtggtccagcctgggaggtccctgagactctcctgtgcagcctctggattcaccttcagtagttatggcatgcactgggtccgccaggctccaggcaaggggctggagtgggtggcatttatgtcatatgatggaagtaataaattctattcagactccgtgaagggccgattcaccatctccagagacaattccaggaaaatgctgtttctgcaaatgaacaacctgagagctgaggacacggctgtgtattactgtgcaagagatcagtattacgattttttgactgatcacggggtctttgactactggggccagggaaccctggtcaccgtctcctca

SEQ ID NO: 98 - protein, 124 aa, synthetic construct
  REGION 1..124: note = synthetic
QVQLVESGGGVVQPGRSLRLSCAASGFTFSSYGMHWVRQAPGKGLEWVAFMSYDGSNKFYSDSVKGRFTISRDNSRKMLFLQMNNLRAEDTAVYYCARDQYYDFLTDHGVFDYWGQGTLVTVSS

SEQ ID NO: 99 - DNA, 24 bp, synthetic construct
  misc_feature 1..24: note = synthetic
  source 1..24: mol_type = other DNA
ggattcaccttcagtagttatggc

SEQ ID NO: 100 - protein, 8 aa, synthetic construct
  REGION 1..8: note = synthetic
GFTFSSYG

SEQ ID NO: 101 - DNA, 24 bp, synthetic construct
  misc_feature 1..24: note = synthetic
  source 1..24: mol_type = other DNA
atgtcatatgatggaagtaataaa

SEQ ID NO: 102 - protein, 8 aa, synthetic construct
  REGION 1..8: note = synthetic
MSYDGSNK

SEQ ID NO: 103 - DNA, 51 bp, synthetic construct
  misc_feature 1..51: note = synthetic
  source 1..51: mol_type = other DNA
gcaagagatcagtattacgattttttgactgatcacggggtctttgactac

SEQ ID NO: 104 - protein, 17 aa, synthetic construct
  REGION 1..17: note = synthetic
ARDQYYDFLTDHGVFDY

SEQ ID NO: 105 - DNA, 381 bp, synthetic construct
  misc_feature 1..381: note = synthetic
  source 1..381: mol_type = other DNA
caggtgcagctggtggagtctgggggaggcgtggtccagcctgggaggtccctgagactctcctgtgcagcctctggattcaccttcattatctatgacatgcactgggtccgccaggctccaggcaaggggctggagtgggtggcagttatatcatatgatggaagtaataaatactatgcagactccgtgaagggccgattcaccatctccagagacaattccaagaacacgctgtatctgcagatgaacagcctgagagctgaggacacggctttttattactgtgcgaaagatcgtcagcgtggatatagtggctacgatgatgactattacggtatggacgtctggggccaagggaccacggtcaccgtctcctca

SEQ ID NO: 106 - protein, 127 aa, synthetic construct
  REGION 1..127: note = synthetic
QVQLVESGGGVVQPGRSLRLSCAASGFTFIIYDMHWVRQAPGKGLEWVAVISYDGSNKYYADSVKGRFTISRDNSKNTLYLQMNSLRAEDTAFYYCAKDRQRGYSGYDDDYYGMDVWGQGTTVTVSS

SEQ ID NO: 107 - DNA, 24 bp, synthetic construct
  misc_feature 1..24: note = synthetic
  source 1..24: mol_type = other DNA
ggattcaccttcattatctatgac

SEQ ID NO: 108 - protein, 8 aa, synthetic construct
  REGION 1..8: note = synthetic
GFTFIIYD

SEQ ID NO: 109 - DNA, 24 bp, synthetic construct
  misc_feature 1..24: note = synthetic
  source 1..24: mol_type = other DNA
atatcatatgatggaagtaataaa

SEQ ID NO: 110 - protein, 8 aa, synthetic construct
  REGION 1..8: note = synthetic
ISYDGSNK

SEQ ID NO: 111 - DNA, 60 bp, synthetic construct
  misc_feature 1..60: note = synthetic
  source 1..60: mol_type = other DNA
gcgaaagatcgtcagcgtggatatagtggctacgatgatgactattacggtatggacgtc

SEQ ID NO: 112 - protein, 20 aa, synthetic construct
  REGION 1..20: note = synthetic
AKDRQRGYSGYDDDYYGMDV

SEQ ID NO: 113 - DNA, 369 bp, synthetic construct
  misc_feature 1..369: note = synthetic
  source 1..369: mol_type = other DNA
caggtgcagctggtggagtctgggggaggcgtggtccagcctgggaggtccctgagactctcctgtgcagcgtctggattcaccttcagtagttatgacatccactgggtccgccaggctccaggcaaggggctggagtgggtgtcagttatatggtatgatggaagtaataagtactatgcagactccgtgaagggccgattcaccatctccagagacaattccaagaacacactgtatctgcaaatgaacagcctgagagccgaggacacggctgtgtattactgtgcgaggacggtagcagctcgaaactacgactactacgttatggacgtctggggccaagggaccacggtcaccgtctcctca

SEQ ID NO: 114 - protein, 123 aa, synthetic construct
  REGION 1..123: note = synthetic
QVQLVESGGGVVQPGRSLRLSCAASGFTFSSYDIHWVRQAPGKGLEWVSVIWYDGSNKYYADSVKGRFTISRDNSKNTLYLQMNSLRAEDTAVYYCARTVAARNYDYYVMDVWGQGTTVTVSS

SEQ ID NO: 115 - DNA, 24 bp, synthetic construct
  misc_feature 1..24: note = synthetic
  source 1..24: mol_type = other DNA
ggattcaccttcagtagttatgac

SEQ ID NO: 116 - protein, 8 aa, synthetic construct
  REGION 1..8: note = synthetic
GFTFSSYD

SEQ ID NO: 117 - DNA, 24 bp, synthetic construct
  misc_feature 1..24: note = synthetic
  source 1..24: mol_type = other DNA
atatggtatgatggaagtaataag

SEQ ID NO: 118 - protein, 8 aa, synthetic construct
  REGION 1..8: note = synthetic
IWYDGSNK

SEQ ID NO: 119 - DNA, 48 bp, synthetic construct
  misc_feature 1..48: note = synthetic
  source 1..48: mol_type = other DNA
gcgaggacggtagcagctcgaaactacgactactacgttatggacgtc

SEQ ID NO: 120 - protein, 16 aa, synthetic construct
  REGION 1..16: note = synthetic
ARTVAARNYDYYVMDV

SEQ ID NO: 121 - DNA, 381 bp, synthetic construct
  misc_feature 1..381: note = synthetic
  source 1..381: mol_type = other DNA
caggtgcagctggtggagtctgggggaggcgtggtccagcctgggaggtccctgagactctcctgtgcagcgtctggattcaccttcattacctatggcatgcactgggtccgccaggctccaggcaaggggctggagtgggtggcgattatttactatgatgaaagcaataaatactatgcagactccgtgaagggccgattcaccatctccagagacatttccaagaacacgctttatctgcaaatgaacggcctgagagccgaggacacggctgtatattactgtgcgagagccccccgtgtggcagtcgaggaagattattcctactattacggtatggacgtctggggccaagggaccacggtcaccgtctcctca

SEQ ID NO: 122 - protein, 127 aa, synthetic construct
  REGION 1..127: note = synthetic
QVQLVESGGGVVQPGRSLRLSCAASGFTFITYGMHWVRQAPGKGLEWVAIIYYDESNKYYADSVKGRFTISRDISKNTLYLQMNGLRAEDTAVYYCARAPRVAVEEDYSYYYGMDVWGQGTTVTVSS

SEQ ID NO: 123 - DNA, 24 bp, synthetic construct
  misc_feature 1..24: note = synthetic
  source 1..24: mol_type = other DNA
ggattcaccttcattacctatggc

SEQ ID NO: 124 - protein, 8 aa, synthetic construct
  REGION 1..8: note = synthetic
GFTFITYG

SEQ ID NO: 125 - DNA, 24 bp, synthetic construct
  misc_feature 1..24: note = synthetic
  source 1..24: mol_type = other DNA
atttactatgatgaaagcaataaa

SEQ ID NO: 126 - protein, 8 aa, synthetic construct
  REGION 1..8: note = synthetic
IYYDESNK

SEQ ID NO: 127 - DNA, 60 bp, synthetic construct
  misc_feature 1..60: note = synthetic
  source 1..60: mol_type = other DNA
gcgagagccccccgtgtggcagtcgaggaagattattcctactattacggtatggacgtc

SEQ ID NO: 128 - protein, 20 aa, synthetic construct
  REGION 1..20: note = synthetic
ARAPRVAVEEDYSYYYGMDV

SEQ ID NO: 129 - DNA, 321 bp, synthetic construct
  misc_feature 1..321: note = synthetic
  source 1..321: mol_type = other DNA
gacatccagatgacccagtctccatcctccctgtctgcatctgtaggagacagagtcaccatcacttgccgggcgagtcagggcattagaaatgatttaggctggtatcaacagaaaccagggagagcccctaagcgcctgatctatggtgcatccaatttgcaaagtggggtcccatcaaggttcagcggcagtggatctgggacagaattcactctcacaatcagcagcctgcagcctgaagattttgcaacttattactgtctacagcataatagtcacccgtacacttttggccaggggaccaagctggagatcaaa

SEQ ID NO: 130 - protein, 107 aa, synthetic construct
  REGION 1..107: note = synthetic
DIQMTQSPSSLSASVGDRVTITCRASQGIRNDLGWYQQKPGRAPKRLIYGASNLQSGVPSRFSGSGSGTEFTLTISSLQPEDFATYYCLQHNSHPYTFGQGTKLEIK

SEQ ID NO: 131 - DNA, 18 bp, synthetic construct
  misc_feature 1..18: note = synthetic
  source 1..18: mol_type = other DNA
cagggcattagaaatgat

SEQ ID NO: 132 - protein, 6 aa, synthetic construct
  REGION 1..6: note = synthetic
QGIRND

SEQ ID NO: 133-134 - skipped (2 entries)

SEQ ID NO: 135 - DNA, 27 bp, synthetic construct
  misc_feature 1..27: note = synthetic
  source 1..27: mol_type = other DNA
ctacagcataatagtcacccgtacact

SEQ ID NO: 136 - protein, 9 aa, synthetic construct
  REGION 1..9: note = synthetic
LQHNSHPYT

SEQ ID NO: 137 - DNA, 351 bp, synthetic construct
  misc_feature 1..351: note = synthetic
  source 1..351: mol_type = other DNA
gaggtgcaactggtggagtctgggggagccttggtccagactggggggtccctgcgactctcctgtgtagcctctggattcaccttcagcaactattggatgagctgggtccgccagtctccagggaaggggctgcagtgggtggcctccattaagaaagatggaagtgacgaagactatgtggactctgtgaagggccgattcaccatctccagggacaacgccgaaaattcactgtatctacagatgactagcctgagaatcgaggacacggctgtatattattgtgcgagatttatatcagcggttggagtagactggggccagggagccctggtcaccgtttcctca

SEQ ID NO: 138 - protein, 117 aa, synthetic construct
  REGION 1..117: note = synthetic
EVQLVESGGALVQTGGSLRLSCVASGFTFSNYWMSWVRQSPGKGLQWVASIKKDGSDEDYVDSVKGRFTISRDNAENSLYLQMTSLRIEDTAVYYCARFISAVGVDWGQGALVTVSS

SEQ ID NO: 139 - DNA, 24 bp, synthetic construct
  misc_feature 1..24: note = synthetic
  source 1..24: mol_type = other DNA
ggattcaccttcagcaactattgg

SEQ ID NO: 140 - protein, 8 aa, synthetic construct
  REGION 1..8: note = synthetic
GFTFSNYW

SEQ ID NO: 141 - DNA, 24 bp, synthetic construct
  misc_feature 1..24: note = synthetic
  source 1..24: mol_type = other DNA
attaagaaagatggaagtgacgaa

SEQ ID NO: 142 - protein, 8 aa, synthetic construct
  REGION 1..8: note = synthetic
IKKDGSDE

SEQ ID NO: 143 - DNA, 30 bp, synthetic construct
  misc_feature 1..30: note = synthetic
  source 1..30: mol_type = other DNA
gcgagatttatatcagcggttggagtagac

SEQ ID NO: 144 - protein, 10 aa, synthetic construct
  REGION 1..10: note = synthetic
ARFISAVGVD

SEQ ID NO: 145 - DNA, 324 bp, synthetic construct
  misc_feature 1..324: note = synthetic
  source 1..324: mol_type = other DNA
gacatccagatgacccagtctccatcctccctgtctgcatctgttggagacagcgtcaccatcacttgccgggcaagtcagagcattaacaactatttaaattggtatcagcagaaaccagggaaagcccctaagctcctgatctatactgcatccagtttgctaagtggggtcccttcaaggttcagtggcagtggatctgggacagatttcactctcaccatcagcggtctgcaccctgaagattttgcaacttacttctgtcaacagagtttcagtacccctccgatcaccttcggccaagggacacgactggacattaaa

SEQ ID NO: 146 - protein, 108 aa, synthetic construct
  REGION 1..108: note = synthetic
DIQMTQSPSSLSASVGDSVTITCRASQSINNYLNWYQQKPGKAPKLLIYTASSLLSGVPSRFSGSGSGTDFTLTISGLHPEDFATYFCQQSFSTPPITFGQGTRLDIK

SEQ ID NO: 147 - DNA, 18 bp, synthetic construct
  misc_feature 1..18: note = synthetic
  source 1..18: mol_type = other DNA
cagagcattaacaactat

SEQ ID NO: 148 - protein, 6 aa, synthetic construct
  REGION 1..6: note = synthetic
QSINNY

SEQ ID NO: 149-150 - skipped (2 entries)

SEQ ID NO: 151 - DNA, 30 bp, synthetic construct
  misc_feature 1..30: note = synthetic
  source 1..30: mol_type = other DNA
caacagagtttcagtacccctccgatcacc

SEQ ID NO: 152 - protein, 10 aa, synthetic construct
  REGION 1..10: note = synthetic
QQSFSTPPIT

SEQ ID NO: 153 - DNA, 369 bp, synthetic construct
  misc_feature 1..369: note = synthetic
  source 1..369: mol_type = other DNA
gaagtgcaactggtggagtctgggggaggcttagtacagcctggcgggtccctgagactctcctgtgcagccactggattcacctttgatgattttaccatgcactgggtccggcaagctccagggaagggcctggagtgggtctcaggtatcagttggaatagtggtagcataggctatgtggactctgtgaagggccgattcaccatctccagagacaacgccaagaactccctgtatctgcaaatgaacagtctgagagctgaggacacggccttgtactactgtgcaaaagataatagtggctacggctattattactacggtatggacgtctggggccaagggaccacggtcaccgtctcctca

SEQ ID NO: 154 - protein, 123 aa, synthetic construct
  REGION 1..123: note = synthetic
EVQLVESGGGLVQPGGSLRLSCAATGFTFDDFTMHWVRQAPGKGLEWVSGISWNSGSIGYVDSVKGRFTISRDNAKNSLYLQMNSLRAEDTALYYCAKDNSGYGYYYYGMDVWGQGTTVTVSS

SEQ ID NO: 155 - DNA, 24 bp, synthetic construct
  misc_feature 1..24: note = synthetic
  source 1..24: mol_type = other DNA
ggattcacctttgatgattttacc

SEQ ID NO: 156 - protein, 8 aa, synthetic construct
  REGION 1..8: note = synthetic
GFTFDDFT

SEQ ID NO: 157 - DNA, 24 bp, synthetic construct
  misc_feature 1..24: note = synthetic
  source 1..24: mol_type = other DNA
atcagttggaatagtggtagcata

SEQ ID NO: 158 - protein, 8 aa, synthetic construct
  REGION 1..8: note = synthetic
ISWNSGSI

SEQ ID NO: 159 - DNA, 48 bp, synthetic construct
  misc_feature 1..48: note = synthetic
  source 1..48: mol_type = other DNA
gcaaaagataatagtggctacggctattattactacggtatggacgtc

SEQ ID NO: 160 - protein, 16 aa, synthetic construct
  REGION 1..16: note = synthetic
AKDNSGYGYYYYGMDV

SEQ ID NO: 161 - DNA, 321 bp, synthetic construct
  misc_feature 1..321: note = synthetic
  source 1..321: mol_type = other DNA
gaaatagtgatgacgcagtctccagccaccctgtctgtgtctccaggggaaagagccaccctctcctgcagggccagtcacagtgttagcaggaactcagcctggtaccagcagaaacctggccaggctcccaggctcctcatctatggtgcatccaccagggccactggtatcccagccaggttcagtggcagtgggtctgggacagaattcactctcaccatcagcagcctgcagtctgaagattttgcaatttattactgtcagcagtataataattggcctctcactttcggcggagggaccaaggtggagatcaaa

SEQ ID NO: 162 - protein, 107 aa, synthetic construct
  REGION 1..107: note = synthetic
EIVMTQSPATLSVSPGERATLSCRASHSVSRNSAWYQQKPGQAPRLLIYGASTRATGIPARFSGSGSGTEFTLTISSLQSEDFAIYYCQQYNNWPLTFGGGTKVEIK

SEQ ID NO: 163 - DNA, 18 bp, synthetic construct
  misc_feature 1..18: note = synthetic
  source 1..18: mol_type = other DNA
cacagtgttagcaggaac

SEQ ID NO: 164 - protein, 6 aa, synthetic construct
  REGION 1..6: note = synthetic
HSVSRN

SEQ ID NO: 165-166 - skipped (2 entries)

SEQ ID NO: 167 - DNA, 27 bp, synthetic construct
  misc_feature 1..27: note = synthetic
  source 1..27: mol_type = other DNA
cagcagtataataattggcctctcact

SEQ ID NO: 168 - protein, 9 aa, synthetic construct
  REGION 1..9: note = synthetic
QQYNNWPLT

SEQ ID NO: 169 - DNA, 372 bp, synthetic construct
  misc_feature 1..372: note = synthetic
  source 1..372: mol_type = other DNA
gaagtgcaactggtggaatcggggggaggcttggtacagcctggcgggtccctgagactctcctgtgcagcctctggattctcctttgatgattataccatgcactgggtccggcaacctccagggaagggcctggagtgggtctcaggtattagttggaatagtggtagcataggctatgcggactctgtgaagggccgattcaccatctccagagacaacgccaagaactccctgtatctgcaaatgaacagtctgagagctggggacacggccttgtactactgtgcaaaagataatagtggctacggctattactactactacggtatggacgtctggggccaagggaccacggtcaccgtctcctca

SEQ ID NO: 170 - protein, 124 aa, synthetic construct
  REGION 1..124: note = synthetic
EVQLVESGGGLVQPGGSLRLSCAASGFSFDDYTMHWVRQPPGKGLEWVSGISWNSGSIGYADSVKGRFTISRDNAKNSLYLQMNSLRAGDTALYYCAKDNSGYGYYYYYGMDVWGQGTTVTVSS

SEQ ID NO: 171 - DNA, 24 bp, synthetic construct
  misc_feature 1..24: note = synthetic
  source 1..24: mol_type = other DNA
ggattctcctttgatgattatacc

SEQ ID NO: 172 - protein, 8 aa, synthetic construct
  REGION 1..8: note = synthetic
GFSFDDYT

SEQ ID NO: 173 - DNA, 24 bp, synthetic construct
  misc_feature 1..24: note = synthetic
  source 1..24: mol_type = other DNA
attagttggaatagtggtagcata

SEQ ID NO: 174 - protein, 8 aa, synthetic construct
  REGION 1..8: note = synthetic
ISWNSGSI

SEQ ID NO: 175 - DNA, 51 bp, synthetic construct
  misc_feature 1..51: note = synthetic
  source 1..51: mol_type = other DNA
gcaaaagataatagtggctacggctattactactactacggtatggacgtc

SEQ ID NO: 176 - protein, 17 aa, synthetic construct
  REGION 1..17: note = synthetic
AKDNSGYGYYYYYGMDV

SEQ ID NO: 177 - DNA, 321 bp, synthetic construct
  misc_feature 1..321: note = synthetic
  source 1..321: mol_type = other DNA
gaaatagtgatgacgcagtctccagccaccctgtctgtgtctccaggggaaagagccaccctctcctgcagggccagtcagagtgttagcagcaacttagcctggtaccagcagaaacctggccaggctcccagactcctcatctatggtgcatccaccagggccactggtatcccagccaggttcagtggcagtgggtctgggacagaattcactctcaccatcagcagcctgcagtctgaagattttgcagtttattactgtcagcagtattataactggcctctcactttcggcggagggaccaaggtggagatcaaa

SEQ ID NO: 178 - protein, 107 aa, synthetic construct
  REGION 1..107: note = synthetic
EIVMTQSPATLSVSPGERATLSCRASQSVSSNLAWYQQKPGQAPRLLIYGASTRATGIPARFSGSGSGTEFTLTISSLQSEDFAVYYCQQYYNWPLTFGGGTKVEIK

SEQ ID NO: 179 - DNA, 18 bp, synthetic construct
  misc_feature 1..18: note = synthetic
  source 1..18: mol_type = other DNA
cagagtgttagcagcaac

SEQ ID NO: 180 - protein, 6 aa, synthetic construct
  REGION 1..6: note = synthetic
QSVSSN

SEQ ID NO: 181-182 - skipped (2 entries)

SEQ ID NO: 183 - DNA, 27 bp, synthetic construct
  misc_feature 1..27: note = synthetic
  source 1..27: mol_type = other DNA
cagcagtattataactggcctctcact

SEQ ID NO: 184 - protein, 9 aa, synthetic construct
  REGION 1..9: note = synthetic
QQYYNWPLT

SEQ ID NO: 185 - DNA, 372 bp, synthetic construct
  misc_feature 1..372: note = synthetic
  source 1..372: mol_type = other DNA
gaagtacagctggtggagtctgggggaggcttggtacagcctggcaggtccctgagactctcctgtgtagcctctggattcccctttgctgattataccatgcactgggtccggcaagctccagggaagggcctggagtgggtctcagatattagttggaatagtggtagcaaaggctatgcggactctgtgaagggccgattcaccatctccagagacaatgccaagaactccctgtatctgcaaatgaacagtctgagaactgaggacacggccttctattactgtgcaaaagatatgagtggctacgcccactacttctactacggtatggacgtctggggccaagggaccacggtcaccgtctcctca

SEQ ID NO: 186 - protein, 124 aa, synthetic construct
  REGION 1..124: note = synthetic
EVQLVESGGGLVQPGRSLRLSCVASGFPFADYTMHWVRQAPGKGLEWVSDISWNSGSKGYADSVKGRFTISRDNAKNSLYLQMNSLRTEDTAFYYCAKDMSGYAHYFYYGMDVWGQGTTVTVSS

SEQ ID NO: 187 - DNA, 24 bp, synthetic construct
  misc_feature 1..24: note = synthetic
  source 1..24: mol_type = other DNA
ggattcccctttgctgattatacc

SEQ ID NO: 188 - protein, 8 aa, synthetic construct
  REGION 1..8: note = synthetic
GFPFADYT

SEQ ID NO: 189 - DNA, 24 bp, synthetic construct
  misc_feature 1..24: note = synthetic
  source 1..24: mol_type = other DNA
attagttggaatagtggtagcaaa

SEQ ID NO: 190 - protein, 8 aa, synthetic construct
  REGION 1..8: note = synthetic
ISWNSGSK

SEQ ID NO: 191 - DNA, 51 bp, synthetic construct
  misc_feature 1..51: note = synthetic
  source 1..51: mol_type = other DNA
gcaaaagatatgagtggctacgcccactacttctactacggtatggacgtc

SEQ ID NO: 192 - protein, 17 aa, synthetic construct
  REGION 1..17: note = synthetic
AKDMSGYAHYFYYGMDV

SEQ ID NO: 193 - DNA, 324 bp, synthetic construct
  misc_feature 1..324: note = synthetic
  source 1..324: mol_type = other DNA
gacatccagatgacccagtctccatcctccctgtctgcatctgtaggagacagagtcaccatcacttgccggccaagtcagagcattagcagctatttaaattggtttcagcagaaaccagggaaagcccctaagctcctgatctatgctgcatccagtttgcaaagtggggtcccatcaaggttcagtggcagtggatctgggacagatttcactctcaccatcagcagtctgcaacctgaagattttgcaacttactactgtcaacagagttacagtacccctccgatcaccttcggccaagggacacgactggagattaaa

SEQ ID NO: 194 - protein, 108 aa, synthetic construct
  REGION 1..108: note = synthetic
DIQMTQSPSSLSASVGDRVTITCRPSQSISSYLNWFQQKPGKAPKLLIYAASSLQSGVPSRFSGSGSGTDFTLTISSLQPEDFATYYCQQSYSTPPITFGQGTRLEIK

SEQ ID NO: 195 - DNA, 18 bp, synthetic construct
  misc_feature 1..18: note = synthetic
  source 1..18: mol_type = other DNA
cagagcattagcagctat

SEQ ID NO: 196 - protein, 6 aa, synthetic construct
  REGION 1..6: note = synthetic
QSISSY

SEQ ID NO: 197-198 - skipped (2 entries)

SEQ ID NO: 199 - DNA, 30 bp, synthetic construct
  misc_feature 1..30: note = synthetic
  source 1..30: mol_type = other DNA
caacagagttacagtacccctccgatcacc

SEQ ID NO: 200 - protein, 10 aa, synthetic construct
  REGION 1..10: note = synthetic
QQSYSTPPIT

SEQ ID NO: 201 - DNA, 372 bp, synthetic construct
  misc_feature 1..372: note = synthetic
  source 1..372: mol_type = other DNA
gaagtacaactggtggagtctgggggaggcttggtacagcctggcaggtccctaagactctcctgtgcagcctctggattcacctttgatgattataccatgcactgggtccggcaagttccagggaagggcctggagtgggtctcaggtattagttggaatagtggcagcttggcctacgcggactctgtgaagggccgattcaccatctccagagacaacgccaagaattccctgtatctgcaaatgaacagtcttcaccctgaggacacggccctctattactgtgtaaaagatggtagtggctacggccactactcctactacggtttggacgtctggggccaggggaccacggtcaccgtctcctca

SEQ ID NO: 202 - protein, 124 aa, synthetic construct
  REGION 1..124: note = synthetic
EVQLVESGGGLVQPGRSLRLSCAASGFTFDDYTMHWVRQVPGKGLEWVSGISWNSGSLAYADSVKGRFTISRDNAKNSLYLQMNSLHPEDTALYYCVKDGSGYGHYSYYGLDVWGQGTTVTVSS

SEQ ID NO: 203 - DNA, 24 bp, synthetic construct
  misc_feature 1..24: note = synthetic
  source 1..24: mol_type = other DNA
ggattcacctttgatgattatacc

SEQ ID NO: 204 - protein, 8 aa, synthetic construct
  REGION 1..8: note = synthetic
GFTFDDYT

SEQ ID NO: 205 - DNA, 24 bp, synthetic construct
  misc_feature 1..24: note = synthetic
  source 1..24: mol_type = other DNA
attagttggaatagtggcagcttg

SEQ ID NO: 206 - protein, 8 aa, synthetic construct
  REGION 1..8: note = synthetic
ISWNSGSL

SEQ ID NO: 207 - DNA, 51 bp, synthetic construct
  misc_feature 1..51: note = synthetic
  source 1..51: mol_type = other DNA
gtaaaagatggtagtggctacggccactactcctactacggtttggacgtc

SEQ ID NO: 208 - protein, 17 aa, synthetic construct
  REGION 1..17: note = synthetic
VKDGSGYGHYSYYGLDV

SEQ ID NO: 209 - DNA, 324 bp, synthetic construct
  misc_feature 1..324: note = synthetic
  source 1..324: mol_type = other DNA
gaaattgtgttgacgcagtctccaggcaccctgtctttgtctccaggggaaagagccaccctctcctgcagggccagtcagagtgttagcagcagctacttagcctggtaccagcagaaacctggccaggctcccaggctcctcatctatggtgcatccagcagggccactggcatcccagacaggttcagtggcagtgggtctgggacagacttcactctcaccatcagcagactggagcctgaagattttgcagtgtattactgtcagcagtatggtagttcaccttggacgttcggccaagggaccaaggtggaaatcaaa

SEQ ID NO: 210 - protein, 108 aa, synthetic construct
  REGION 1..108: note = synthetic
EIVLTQSPGTLSLSPGERATLSCRASQSVSSSYLAWYQQKPGQAPRLLIYGASSRATGIPDRFSGSGSGTDFTLTISRLEPEDFAVYYCQQYGSSPWTFGQGTKVEIK

SEQ ID NO: 211 - DNA, 21 bp, synthetic construct
  misc_feature 1..21: note = synthetic
  source 1..21: mol_type = other DNA
cagagtgttagcagcagctac

SEQ ID NO: 212 - protein, 7 aa, synthetic construct
  REGION 1..7: note = synthetic
QSVSSSY

SEQ ID NO: 213-214 - skipped (2 entries)

SEQ ID NO: 215 - DNA, 27 bp, synthetic construct
  misc_feature 1..27: note = synthetic
  source 1..27: mol_type = other DNA
cagcagtatggtagttcaccttggacg

SEQ ID NO: 216 - protein, 9 aa, synthetic construct
  REGION 1..9: note = synthetic
QQYGSSPWT

SEQ ID NO: 217 - DNA, 372 bp, synthetic construct
  misc_feature 1..372: note = synthetic
  source 1..372: mol_type = other DNA
gaagtacagctggtggagtctgggggaggcttggtacagcctggcaggtccctgagactctcctgtgtagcctctggattcccctttgctgattataccatgcactgggtccggcaagctccagggaagggcctggagtgggtctcagatattagttggaatagtggtagcataggctatgcggactctgtgaagggccgattcaccatctccagagacaatgccaagaactccctgtatctgcaaatgaacagtctgagaactgaggacacggccttgtattactgtgcaaaagatatgagtggctacgcccactacttctactacggtatggacgtctggggccaagggaccacggtcaccgtctcctca

SEQ ID NO: 218 - protein, 124 aa, synthetic construct
  REGION 1..124: note = synthetic
EVQLVESGGGLVQPGRSLRLSCVASGFPFADYTMHWVRQAPGKGLEWVSDISWNSGSIGYADSVKGRFTISRDNAKNSLYLQMNSLRTEDTALYYCAKDMSGYAHYFYYGMDVWGQGTTVTVSS

SEQ ID NO: 219 - DNA, 24 bp, synthetic construct
  misc_feature 1..24: note = synthetic
  source 1..24: mol_type = other DNA
ggattcccctttgctgattatacc

SEQ ID NO: 220 - protein, 8 aa, synthetic construct
  REGION 1..8: note = synthetic
GFPFADYT

SEQ ID NO: 221 - DNA, 24 bp, synthetic construct
  misc_feature 1..24: note = synthetic
  source 1..24: mol_type = other DNA
attagttggaatagtggtagcata

SEQ ID NO: 222 - protein, 8 aa, synthetic construct
  REGION 1..8: note = synthetic
ISWNSGSI

SEQ ID NO: 223 - DNA, 51 bp, synthetic construct; identical to SEQ ID NO: 191
  misc_feature 1..51: note = synthetic
  source 1..51: mol_type = other DNA

SEQ ID NO: 224 - protein, 17 aa, synthetic construct
  REGION 1..17: note = synthetic
AKDMSGYAHYFYYGMDV

SEQ ID NO: 225 - DNA, 324 bp, synthetic construct
  misc_feature 1..324: note = synthetic
  source 1..324: mol_type = other DNA
gacatccagatgacccagtctccatcctccctgtctgcatctgtaggagacagagtcaccatcacttgccgggcaagtcagagcattagcagctatttaaattggtatcagcagaaaccagggaaagcccctaagctcctgatctttgctgcatccagtttgcaaagtggggtcccatcaaggttcagtggcagtggatctgggacagatttcactctcaccatcagcagtctgcaacctgaagattttgcaacttactactgtcaacagagttacagtacccctccgatcaccttcggccaagggacacgactggagattaaa

SEQ ID NO: 226 - protein, 108 aa, synthetic construct
  REGION 1..108: note = synthetic
DIQMTQSPSSLSASVGDRVTITCRASQSISSYLNWYQQKPGKAPKLLIFAASSLQSGVPSRFSGSGSGTDFTLTISSLQPEDFATYYCQQSYSTPPITFGQGTRLEIK

SEQ ID NO: 227 - DNA, 18 bp, synthetic construct
  misc_feature 1..18: note = synthetic
  source 1..18: mol_type = other DNA
cagagcattagcagctat

SEQ ID NO: 228 - protein, 6 aa, synthetic construct
  REGION 1..6: note = synthetic
QSISSY

SEQ ID NO: 229-230 - skipped (2 entries)

SEQ ID NO: 231 - DNA, 30 bp, synthetic construct; identical to SEQ ID NO: 199
  misc_feature 1..30: note = synthetic
  source 1..30: mol_type = other DNA

SEQ ID NO: 232 - protein, 10 aa, synthetic construct
  REGION 1..10: note = synthetic
QQSYSTPPIT

SEQ ID NO: 233 - DNA, 372 bp, synthetic construct
  misc_feature 1..372: note = synthetic
  source 1..372: mol_type = other DNA
gaagtgcagctggtggagtctgggggaggcttggtacagcctggcaggtccctgaaactctcctgtacagcctctggattcacctttgctgattataccatgcactgggtccgacaaggtccagggaagggcctggagtgggtctcagatattagttggaatagtggtagtaaaggctatgcggactctgtgaagggccgattcaccatctccagagacaacgccaagaactccctgtatctgcaaatgaacagtctgagaactgaggacacggccttgtattactgtgcaaaagatatgagtggctacgcccactactactactacgctttggacgtctggggccaagggaccacggtcaccgtctcctca

SEQ ID NO: 234 - protein, 124 aa, synthetic construct
  REGION 1..124: note = synthetic
EVQLVESGGGLVQPGRSLKLSCTASGFTFADYTMHWVRQGPGKGLEWVSDISWNSGSKGYADSVKGRFTISRDNAKNSLYLQMNSLRTEDTALYYCAKDMSGYAHYYYYALDVWGQGTTVTVSS

SEQ ID NO: 235 - DNA, 24 bp, synthetic construct
  misc_feature 1..24: note = synthetic
  source 1..24: mol_type = other DNA
ggattcacctttgctgattatacc

SEQ ID NO: 236 - protein, 8 aa, synthetic construct
  REGION 1..8: note = synthetic
GFTFADYT

SEQ ID NO: 237 - DNA, 24 bp, synthetic construct
  misc_feature 1..24: note = synthetic
  source 1..24: mol_type = other DNA
attagttggaatagtggtagtaaa

SEQ ID NO: 238 - protein, 8 aa, synthetic construct
  REGION 1..8: note = synthetic
ISWNSGSK

SEQ ID NO: 239 - DNA, 51 bp, synthetic construct
  misc_feature 1..51: note = synthetic
  source 1..51: mol_type = other DNA
gcaaaagatatgagtggctacgcccactactactactacgctttggacgtc

SEQ ID NO: 240 - protein, 17 aa, synthetic construct
  REGION 1..17: note = synthetic
AKDMSGYAHYYYYALDV

SEQ ID NO: 241 - DNA, 324 bp, synthetic construct
  misc_feature 1..324: note = synthetic
  source 1..324: mol_type = other DNA
gacatccagatgacccagtctccatcctccctgtctgcatctgtaggagacagagtcaccatcacttgccgggcaagtcagagcattagcaactatttaaattggtatcagcagaaaccagggaaagcccctaagctcctgatctatgctgcatccagtttgcaaagtggggtcccatcaaggttcagtggcagtggatctgggacagatttcactctcaccatcagcagtctgcaacctgaagattttgcaacttactactgtcaacagagttacagtaaccccccgatcaccttcggccaagggacacgactggagattaaa

SEQ ID NO: 242 - protein, 108 aa, synthetic construct
  REGION 1..108: note = synthetic
DIQMTQSPSSLSASVGDRVTITCRASQSISNYLNWYQQKPGKAPKLLIYAASSLQSGVPSRFSGSGSGTDFTLTISSLQPEDFATYYCQQSYSNPPITFGQGTRLEIK

SEQ ID NO: 243 - DNA, 18 bp, synthetic construct
  misc_feature 1..18: note = synthetic
  source 1..18: mol_type = other DNA
cagagcattagcaactat

SEQ ID NO: 244 - protein, 6 aa, synthetic construct
  REGION 1..6: note = synthetic
QSISNY

SEQ ID NO: 245-246 - skipped (2 entries)

SEQ ID NO: 247 - DNA, 30 bp, synthetic construct
  misc_feature 1..30: note = synthetic
  source 1..30: mol_type = other DNA
caacagagttacagtaaccccccgatcacc

SEQ ID NO: 248 - protein, 10 aa, synthetic construct
  REGION 1..10: note = synthetic
QQSYSNPPIT

SEQ ID NO: 249 - DNA, 363 bp, synthetic construct
  misc_feature 1..363: note = synthetic
  source 1..363: mol_type = other DNA
caggtgcagctggtggagtctgggggaggcgtggtccagcctgggaggtccctgagactctcctgtgcagcctctggattcaccttcagtagaaaaggcatgcactgggtccgccaggctccagtcaaggggctggagtgggtggcagttatatcatatgatggaagtaataaatactatgcagactccgtgaagggccgattcaccatctccagagacaattccaagaacacgctgtatctgcaaatgaacagcctgacagctgaggacacggctgtgtattactgtgcgaaagaaggggggcatgactatggtggtacctttgactactggggccagggaaccctggtcaccgtctcctca

SEQ ID NO: 250 - protein, 121 aa, synthetic construct
  REGION 1..121: note = synthetic
QVQLVESGGGVVQPGRSLRLSCAASGFTFSRKGMHWVRQAPVKGLEWVAVISYDGSNKYYADSVKGRFTISRDNSKNTLYLQMNSLTAEDTAVYYCAKEGGHDYGGTFDYWGQGTLVTVSS

SEQ ID NO: 251 - DNA, 24 bp, synthetic construct
  misc_feature 1..24: note = synthetic
  source 1..24: mol_type = other DNA
ggattcaccttcagtagaaaaggc

SEQ ID NO: 252 - protein, 8 aa, synthetic construct
  REGION 1..8: note = synthetic
GFTFSRKG

SEQ ID NO: 253 - DNA, 24 bp, synthetic construct
  misc_feature 1..24: note = synthetic
  source 1..24: mol_type = other DNA
atatcatatgatggaagtaataaa

SEQ ID NO: 254 - protein, 8 aa, synthetic construct
  REGION 1..8: note = synthetic
ISYDGSNK

SEQ ID NO: 255 - DNA, 42 bp, synthetic construct
  misc_feature 1..42: note = synthetic
  source 1..42: mol_type = other DNA
gcgaaagaaggggggcatgactatggtggtacctttgactac

SEQ ID NO: 256 - protein, 14 aa, synthetic construct
  REGION 1..14: note = synthetic
AKEGGHDYGGTFDY

SEQ ID NO: 257 - DNA, 321 bp, synthetic construct
  misc_feature 1..321: note = synthetic
  source 1..321: mol_type = other DNA
gacatccagatgacccagtctccatcctccctgtctgcatctgtaggagacagagtcaccatcacttgccaggcgagtcaggacattaacaactatttaaattggtatcagcagaaaccagggaaagcccctaagttcctgatctacgatgcatccaatttggaaacaggggtcccatcaaggttcagtggaagtggatctgggacagattttactttcaccatcagcagcctgcagcctgaagatattgcaacatattactgtcaacagtatgatgatctcccattcactttcggccctgggaccaaagtggatatcaaa

SEQ ID NO: 258 - protein, 107 aa, synthetic construct
  REGION 1..107: note = synthetic
DIQMTQSPSSLSASVGDRVTITCQASQDINNYLNWYQQKPGKAPKFLIYDASNLETGVPSRFSGSGSGTDFTFTISSLQPEDIATYYCQQYDDLPFTFGPGTKVDIK

SEQ ID NO: 259 - DNA, 18 bp, synthetic construct
  misc_feature 1..18: note = synthetic
  source 1..18: mol_type = other DNA
caggacattaacaactat

SEQ ID NO: 260 - protein, 6 aa, synthetic construct
  REGION 1..6: note = synthetic
QDINNY

SEQ ID NO: 261-262 - skipped (2 entries)

SEQ ID NO: 263 - DNA, 27 bp, synthetic construct
  misc_feature 1..27: note = synthetic
  source 1..27: mol_type = other DNA
caacagtatgatgatctcccattcact

SEQ ID NO: 264 - protein, 9 aa, synthetic construct
  REGION 1..9: note = synthetic
QQYDDLPFT

SEQ ID NO: 265 - DNA, 369 bp, synthetic construct
  misc_feature 1..369: note = synthetic
  source 1..369: mol_type = other DNA
gaagtgcagctggtggagtctgggggaggcttggtacagcctggcaggtccctgagactctcctgtgcagcctctggattcacctttgatgattataccatgcactgggtccggcaagctccagggaagggcctggagtgggtctcaggtattagttggaatagtggtagtataggctatgcggactctgtgaagggccgattcaccatctccagagacaacgccaagaagtccctgtatctgcaaatgaacagtctgagagctgaggacacggccttgtattactgtgcaaaagataatagtggctacggtcactactactacggaatggacgtctggggccaagggaccacggtcaccgtcgcctca

SEQ ID NO: 266 - protein, 123 aa, synthetic construct
  REGION 1..123: note = synthetic
EVQLVESGGGLVQPGRSLRLSCAASGFTFDDYTMHWVRQAPGKGLEWVSGISWNSGSIGYADSVKGRFTISRDNAKKSLYLQMNSLRAEDTALYYCAKDNSGYGHYYYGMDVWGQGTTVTVAS

SEQ ID NO: 267 - DNA, 24 bp, synthetic construct
  misc_feature 1..24: note = synthetic
  source 1..24: mol_type = other DNA
ggattcacctttgatgattatacc

SEQ ID NO: 268 - protein, 8 aa, synthetic construct
  REGION 1..8: note = synthetic
GFTFDDYT

SEQ ID NO: 269 - DNA, 24 bp, synthetic construct
  misc_feature 1..24: note = synthetic
  source 1..24: mol_type = other DNA
attagttggaatagtggtagtata

SEQ ID NO: 270 - protein, 8 aa, synthetic construct
  REGION 1..8: note = synthetic
ISWNSGSI

SEQ ID NO: 271 - DNA, 48 bp, synthetic construct
  misc_feature 1..48: note = synthetic
  source 1..48: mol_type = other DNA
gcaaaagataatagtggctacggtcactactactacggaatggacgtc

SEQ ID NO: 272 - protein, 16 aa, synthetic construct
  REGION 1..16: note = synthetic
AKDNSGYGHYYYGMDV

SEQ ID NO: 273 - DNA, 321 bp, synthetic construct
  misc_feature 1..321: note = synthetic
  source 1..321: mol_type = other DNA
gaaatagtgatgacgcagtctccagccaccctgtctgtgtctccaggggaaagagccaccctctcctgcagggccagtcagagtgttagcagcaacttagcctggtaccagcaaaaacctggccaggctcccaggctcctcatctatggtgcatccaccagggccactggtatcccagccaggttcagtggcagtgggtctgggacagagttcactctcaccatcagcagcctgcagtctgaagattttgcagtttattactgtcagcactatattaactggcctctcactttcggcggagggaccaaggtggagatcaaa

SEQ ID NO: 274 - protein, 107 aa, synthetic construct
  REGION 1..107: note = synthetic
EIVMTQSPATLSVSPGERATLSCRASQSVSSNLAWYQQKPGQAPRLLIYGASTRATGIPARFSGSGSGTEFTLTISSLQSEDFAVYYCQHYINWPLTFGGGTKVEIK

SEQ ID NO: 275 - DNA, 18 bp, synthetic construct
  misc_feature 1..18: note = synthetic
  source 1..18: mol_type = other DNA
cagagtgttagcagcaac

SEQ ID NO: 276 - protein, 6 aa, synthetic construct
  REGION 1..6: note = synthetic
QSVSSN

SEQ ID NO: 277-278 - skipped (2 entries)

SEQ ID NO: 279 - DNA, 27 bp, synthetic construct
  misc_feature 1..27: note = synthetic
  source 1..27: mol_type = other DNA
cagcactatattaactggcctctcact

SEQ ID NO: 280 - protein, 9 aa, synthetic construct
  REGION 1..9: note = synthetic
QHYINWPLT

SEQ ID NO: 281 - DNA, 369 bp, synthetic construct; identical to SEQ ID NO: 265
  misc_feature 1..369: note = synthetic
  source 1..369: mol_type = other DNA

SEQ ID NO: 282 - protein, 123 aa, synthetic construct; identical to SEQ ID NO: 266
  REGION 1..123: note = synthetic

SEQ ID NO: 283 - DNA, 24 bp, synthetic construct
  misc_feature 1..24: note = synthetic
  source 1..24: mol_type = other DNA
ggattcacctttgatgattatacc

SEQ ID NO: 284 - protein, 8 aa, synthetic construct
  REGION 1..8: note = synthetic
GFTFDDYT

SEQ ID NO: 285 - DNA, 24 bp, synthetic construct
  misc_feature 1..24: note = synthetic
  source 1..24: mol_type = other DNA
attagttggaatagtggtagtata

SEQ ID NO: 286 - protein, 8 aa, synthetic construct
  REGION 1..8: note = synthetic
ISWNSGSI

SEQ ID NO: 287 - DNA, 48 bp, synthetic construct; identical to SEQ ID NO: 271
  misc_feature 1..48: note = synthetic
  source 1..48: mol_type = other DNA

SEQ ID NO: 288 - protein, 16 aa, synthetic construct
  REGION 1..16: note = synthetic
AKDNSGYGHYYYGMDV

SEQ ID NO: 289 - DNA, 321 bp, synthetic construct; identical to SEQ ID NO: 273
  misc_feature 1..321: note = synthetic
  source 1..321: mol_type = other DNA

SEQ ID NO: 290 - protein, 107 aa, synthetic construct; identical to SEQ ID NO: 274
  REGION 1..107: note = synthetic

SEQ ID NO: 291 - DNA, 18 bp, synthetic construct
  misc_feature 1..18: note = synthetic
  source 1..18: mol_type = other DNA
cagagtgttagcagcaac

SEQ ID NO: 292 - protein, 6 aa, synthetic construct
  REGION 1..6: note = synthetic
QSVSSN

SEQ ID NO: 293-294 - skipped (2 entries)

SEQ ID NO: 295 - DNA, 27 bp, synthetic construct
  misc_feature 1..27: note = synthetic
  source 1..27: mol_type = other DNA
cagcactatattaactggcctctcact

SEQ ID NO: 296 - protein, 9 aa, synthetic construct
  REGION 1..9: note = synthetic
QHYINWPLT

SEQ ID NO: 297 - DNA, 354 bp, synthetic construct
  misc_feature 1..354: note = synthetic
  source 1..354: mol_type = other DNA
caggtgcagttggtggagtctgggggaggcgtggtccagcctgggaggtccctgagactctcctgtggtgcgtctggattcaccttcagaagttatggcatgcactgggtccgccagactccaggcagggggctggagtgggtggcaatgatatattatgatggaaataataaatactatgcagactccgtgaggggccgattcaccgtttccagagacaattccaagaacaccctgtatctgcaaatgagcagcctgagagccgaggacacggctctatatttctgtgcgcgagggcctgggtacaactggctcgacccctggggccagggaaccctggtcaccgtctcctca

SEQ ID NO: 298 - protein, 118 aa, synthetic construct
  REGION 1..118: note = synthetic
QVQLVESGGGVVQPGRSLRLSCGASGFTFRSYGMHWVRQTPGRGLEWVAMIYYDGNNKYYADSVRGRFTVSRDNSKNTLYLQMSSLRAEDTALYFCARGPGYNWLDPWGQGTLVTVSS

SEQ ID NO: 299 - DNA, 24 bp, synthetic construct
  misc_feature 1..24: note = synthetic
  source 1..24: mol_type = other DNA
ggattcaccttcagaagttatggc

SEQ ID NO: 300 - protein, 8 aa, synthetic construct
  REGION 1..8: note = synthetic
GFTFRSYG

SEQ ID NO: 301 - DNA, 24 bp, synthetic construct
  misc_feature 1..24: note = synthetic
  source 1..24: mol_type = other DNA
atatattatgatggaaataataaa

SEQ ID NO: 302 - protein, 8 aa, synthetic construct
  REGION 1..8: note = synthetic
IYYDGNNK

SEQ ID NO: 303 - DNA, 33 bp, synthetic construct
  misc_feature 1..33: note = synthetic
  source 1..33: mol_type = other DNA
gcgcgagggcctgggtacaactggctcgacccc

SEQ ID NO: 304 - protein, 11 aa, synthetic construct
  REGION 1..11: note = synthetic
ARGPGYNWLDP

SEQ ID NO: 305 - DNA, 321 bp, synthetic construct
  misc_feature 1..321: note = synthetic
  source 1..321: mol_type = other DNA
gaaatagtgatgacgcagtctccagccaccctgtctgtgtctccaggggaaagagccaccctctcctgcagggccagtcagagtattagcaggaacttggcctggtaccagcaraaacctggccaggctcccaggctcctcatctatggtgcatccaccagggccactggtatcccagccaggttcagtggcagtgggtctgggacagagttcactctcaccatcagcagcctgcagtctgaagattttgcagtttattactgtcagcagtataataaccggcctctcactttcggcggagggaccgaggtggagatcaaa

SEQ ID NO: 306 - protein, 107 aa, synthetic construct
  REGION 1..107: note = synthetic
  VARIANT 38: note = Xaa = Any Amino Acid
EIVMTQSPATLSVSPGERATLSCRASQSISRNLAWYQXKPGQAPRLLIYGASTRATGIPARFSGSGSGTEFTLTISSLQSEDFAVYYCQQYNNRPLTFGGGTEVEIK

SEQ ID NO: 307 - DNA, 18 bp, synthetic construct
  misc_feature 1..18: note = synthetic
  source 1..18: mol_type = other DNA
cagagtattagcaggaac

SEQ ID NO: 308 - protein, 6 aa, synthetic construct
  REGION 1..6: note = synthetic
QSISRN

SEQ ID NO: 309-310 - skipped (2 entries)

SEQ ID NO: 311 - DNA, 27 bp, synthetic construct
  misc_feature 1..27: note = synthetic
  source 1..27: mol_type = other DNA
cagcagtataataaccggcctctcact

SEQ ID NO: 312 - protein, 9 aa, synthetic construct
  REGION 1..9: note = synthetic
QQYNNRPLT

SEQ ID NO: 313 - DNA, 354 bp, synthetic construct
  misc_feature 1..354: note = synthetic
  source 1..354: mol_type = other DNA
caggtgcagttggtggagtctgggggaggcgtggtccagcctgggaggtccctgagactcgcctgtgttgcgtctggattcaccttcagaagttatggcatgcactgggtccgccaggctccaggcaagggactgcagtgggtggcaatgatttactatgatggtaagaataaatattatgcagactccgtgaggggccgattcaccatctccagagacaattccaagaacacactgtatctgcaaatgaacaatctgagagtcgaggacacggctatgtatttctgtgcgcgagggcctgggtacaattggctcgacccctggggccagggaaccctggtcactgtttcctca

SEQ ID NO: 314 - protein, 118 aa, synthetic construct
  REGION 1..118: note = synthetic
QVQLVESGGGVVQPGRSLRLACVASGFTFRSYGMHWVRQAPGKGLQWVAMIYYDGKNKYYADSVRGRFTISRDNSKNTLYLQMNNLRVEDTAMYFCARGPGYNWLDPWGQGTLVTVSS

SEQ ID NO: 315 - DNA, 24 bp, synthetic construct
  misc_feature 1..24: note = synthetic
  source 1..24: mol_type = other DNA
ggattcaccttcagaagttatggc

SEQ ID NO: 316 - protein, 8 aa, synthetic construct
  REGION 1..8: note = synthetic
GFTFRSYG

SEQ ID NO: 317 - DNA, 24 bp, synthetic construct
  misc_feature 1..24: note = synthetic
  source 1..24: mol_type = other DNA
atttactatgatggtaagaataaa

SEQ ID NO: 318 - protein, 8 aa, synthetic construct
  REGION 1..8: note = synthetic
IYYDGKNK

SEQ ID NO: 319 - DNA, 33 bp, synthetic construct
  misc_feature 1..33: note = synthetic
  source 1..33: mol_type = other DNA
gcgcgagggcctgggtacaattggctcgacccc

SEQ ID NO: 320 - protein, 11 aa, synthetic construct
  REGION 1..11: note = synthetic
ARGPGYNWLDP

SEQ ID NO: 321 - DNA, 321 bp, synthetic construct
  misc_feature 1..321: note = synthetic
  source 1..321: mol_type = other DNA
gaaatagtgatgacgcagtctccagccaccctgtctgtgtctccaggggaaagagccaccctctcctgcagggccagtcagagaattagcagcaacttggcctggtaccagcaaaaacctggccaggctcccaggctcctcatctatggtgcatccaccagggccactggtagcccagccaggttcagtggcagtgggtctgggacagacttcactctcaccatcagcagcctgcagtctgaggatgttgcagtttattactgtcagcaacatcataactggcctctcactttcggcggagggaccaaggtggagatcaaa

SEQ ID NO: 322 - protein, 107 aa, synthetic construct
  REGION 1..107: note = synthetic
EIVMTQSPATLSVSPGERATLSCRASQRISSNLAWYQQKPGQAPRLLIYGASTRATGSPARFSGSGSGTDFTLTISSLQSEDVAVYYCQQHHNWPLTFGGGTKVEIK

SEQ ID NO: 323 - DNA, 18 bp, synthetic construct
  misc_feature 1..18: note = synthetic
  source 1..18: mol_type = other DNA
cagagaattagcagcaac

SEQ ID NO: 324 - protein, 6 aa, synthetic construct
  REGION 1..6: note = synthetic
QRISSN

SEQ ID NO: 325-326 - skipped (2 entries)

SEQ ID NO: 327 - DNA, 27 bp, synthetic construct
  misc_feature 1..27: note = synthetic
  source 1..27: mol_type = other DNA
cagcaacatcataactggcctctcact

SEQ ID NO: 328 - protein, 9 aa, synthetic construct
  REGION 1..9: note = synthetic
QQHHNWPLT

SEQ ID NO: 329 - DNA, 354 bp, synthetic construct
  misc_feature 1..354: note = synthetic
  source 1..354: mol_type = other DNA
caggtgcagctggtggagtctgggggaggcgtggtccagcctgggaggtccctgagactctcctgtgctgcgtctggatttaccttcagaagttatgccatgcactgggtccgccaggctccaggcaaggggctggagtgggtggcaatggtatactatgatggaaataatcaatactatgcagactccgtgaggggccgattcaccatctccagagacaattccaagaacacgctgtatctgcaaatgaacagcctgagagccgatgacacggctgtgtatttctgtgcgcgagggcctgggtacaactggctcgacccctggggccagggaaccctggtcaccgtctcctca

SEQ ID NO: 330 - protein, 118 aa, synthetic construct
  REGION 1..118: note = synthetic
QVQLVESGGGVVQPGRSLRLSCAASGFTFRSYAMHWVRQAPGKGLEWVAMVYYDGNNQYYADSVRGRFTISRDNSKNTLYLQMNSLRADDTAVYFCARGPGYNWLDPWGQGTLVTVSS

SEQ ID NO: 331 - DNA, 24 bp, synthetic construct
  misc_feature 1..24: note = synthetic
  source 1..24: mol_type = other DNA
ggatttaccttcagaagttatgcc

SEQ ID NO: 332 - protein, 8 aa, synthetic construct
  REGION 1..8: note = synthetic
GFTFRSYA

SEQ ID NO: 333 - DNA, 24 bp, synthetic construct
  misc_feature 1..24: note = synthetic
  source 1..24: mol_type = other DNA
gtatactatgatggaaataatcaa

SEQ ID NO: 334 - protein, 8 aa, synthetic construct
  REGION 1..8: note = synthetic
VYYDGNNQ

SEQ ID NO: 335 - DNA, 33 bp, synthetic construct; identical to SEQ ID NO: 303
  misc_feature 1..33: note = synthetic
  source 1..33: mol_type = other DNA

SEQ ID NO: 336 - protein, 11 aa, synthetic construct
  REGION 1..11: note = synthetic
ARGPGYNWLDP

SEQ ID NO: 337 - DNA, 321 bp, synthetic construct
  misc_feature 1..321: note = synthetic
  source 1..321: mol_type = other DNA
gaaatagtgatgacgcagtctccagccaccctgtctgtgtctccaggggaaagagccaccctctcctgcagggccagtcagagtgttagcaggaacttggcctggtaccagcaaaaacctggccaggctcccaggctcctcatctatggtgcatccaccagggccactggtatcccggccaggttcagtggcagtgggtctgggacagacttcactctcaccatcagcagcctgcagtctgaagattttgcagtttattactgtcagcagtataataactggcctctcactttcggcggagggaccaaggtggtgatcaaa

SEQ ID NO: 338 - protein, 107 aa, synthetic construct
  REGION 1..107: note = synthetic
EIVMTQSPATLSVSPGERATLSCRASQSVSRNLAWYQQKPGQAPRLLIYGASTRATGIPARFSGSGSGTDFTLTISSLQSEDFAVYYCQQYNNWPLTFGGGTKVVIK

SEQ ID NO: 339 - DNA, 18 bp, synthetic construct
  misc_feature 1..18: note = synthetic
  source 1..18: mol_type = other DNA
cagagtgttagcaggaac

SEQ ID NO: 340 - protein, 6 aa, synthetic construct
  REGION 1..6: note = synthetic
QSVSRN

SEQ ID NO: 341-342 - skipped (2 entries)

SEQ ID NO: 343 - DNA, 27 bp, synthetic construct
  misc_feature 1..27: note = synthetic
  source 1..27: mol_type = other DNA
cagcagtataataactggcctctcact

SEQ ID NO: 344 - protein, 9 aa, synthetic construct
  REGION 1..9: note = synthetic
QQYNNWPLT

SEQ ID NO: 345 - DNA, 354 bp, synthetic construct
  misc_feature 1..354: note = synthetic
  source 1..354: mol_type = other DNA
caggtgcagctggtggagtctgggggaggcgtggtccagcctgggaggtccctgagactctcctgtattgcgtctggatttaccttcagaagttatggcatgcactgggtccgccaggctccaggcaaggggctggagtgggtggcaatgatatattatgatggaaacaataaatactatgcagactccgtgaggggccgattcaccatctccagagacaactccaagaacacgctgtatctgcaaatgaacagcctgagagccgatgacacggctgtgtatttctgtgcgcgagggcctgggtacaactggctcgacccctggggccagggaaccctggtcaccgtctcctca

SEQ ID NO: 346 - protein, 118 aa, synthetic construct
  REGION 1..118: note = synthetic
QVQLVESGGGVVQPGRSLRLSCIASGFTFRSYGMHWVRQAPGKGLEWVAMIYYDGNNKYYADSVRGRFTISRDNSKNTLYLQMNSLRADDTAVYFCARGPGYNWLDPWGQGTLVTVSS

SEQ ID NO: 347 - DNA, 24 bp, synthetic construct
  misc_feature 1..24: note = synthetic
  source 1..24: mol_type = other DNA
ggatttaccttcagaagttatggc

SEQ ID NO: 348 - protein, 8 aa, synthetic construct
  REGION 1..8: note = synthetic
GFTFRSYG

SEQ ID NO: 349 - DNA, 24 bp, synthetic construct
  misc_feature 1..24: note = synthetic
  source 1..24: mol_type = other DNA
atatattatgatggaaacaataaa

SEQ ID NO: 350 - protein, 8 aa, synthetic construct
  REGION 1..8: note = synthetic
IYYDGNNK

SEQ ID NO: 351 - DNA, 33 bp, synthetic construct; identical to SEQ ID NO: 303
  misc_feature 1..33: note = synthetic
  source 1..33: mol_type = other DNA

SEQ ID NO: 352 - protein, 11 aa, synthetic construct
  REGION 1..11: note = synthetic
ARGPGYNWLDP

SEQ ID NO: 353 - DNA, 321 bp, synthetic construct
  misc_feature 1..321: note = synthetic
  source 1..321: mol_type = other DNA
gaaatagtgatgacgcagtctccagccacactgtctgtgtctccaggggaaagagccaccctctcctgcagggccagtcagagtgttagcagcaacttggcctggtaccagcagaaacctggccaggctcccaggctcctcatctatggtgcatccaccagggccactggtatcccagccaggttcagtggcagtgggtctgggacagagttcactctcaccatcagcagcctgcagtctgaagattttgcagtttattactgtcagcagtataataacaggcctctcactttcggcggagggaccaaggtggagatcaaa

SEQ ID NO: 354 - protein, 107 aa, synthetic construct
  REGION 1..107: note = synthetic
EIVMTQSPATLSVSPGERATLSCRASQSVSSNLAWYQQKPGQAPRLLIYGASTRATGIPARFSGSGSGTEFTLTISSLQSEDFAVYYCQQYNNRPLTFGGGTKVEIK

SEQ ID NO: 355 - DNA, 18 bp, synthetic construct
  misc_feature 1..18: note = synthetic
  source 1..18: mol_type = other DNA
cagagtgttagcagcaac

SEQ ID NO: 356 - protein, 6 aa, synthetic construct
  REGION 1..6: note = synthetic
QSVSSN

SEQ ID NO: 357-358 - skipped (2 entries)

SEQ ID NO: 359 - DNA, 27 bp, synthetic construct
  misc_feature 1..27: note = synthetic
  source 1..27: mol_type = other DNA
cagcagtataataacaggcctctcact

SEQ ID NO: 360 - protein, 9 aa, synthetic construct
  REGION 1..9: note = synthetic
QQYNNRPLT

SEQ ID NO: 361 - DNA, 354 bp, synthetic construct
  misc_feature 1..354: note = synthetic
  source 1..354: mol_type = other DNA
caggtgcagctggtggagtctgggggaggcgtggtccagccggggaggtccctgagactctcctgtgctgcgtctggattcaccttcagaagttttggcatgcactgggtccgccaggctccaggcaggggactggagtgggtggcaatgatatattttgatggaaaaaataaatactatgcagactccgtgaggggccgattcaccatttccagagacaattccaagaacaccctgtatctggaaatgagtagcctgagagccgaggacacggctgtatatttctgtgcgcgagggcctgggtacaactggctcgacccctggggccagggaaccctggtcaccgtctcctca

SEQ ID NO: 362 - protein, 118 aa, synthetic construct
  REGION 1..118: note = synthetic
QVQLVESGGGVVQPGRSLRLSCAASGFTFRSFGMHWVRQAPGRGLEWVAMIYFDGKNKYYADSVRGRFTISRDNSKNTLYLEMSSLRAEDTAVYFCARGPGYNWLDPWGQGTLVTVSS

SEQ ID NO: 363 - DNA, 24 bp, synthetic construct
  misc_feature 1..24: note = synthetic
  source 1..24: mol_type = other DNA
ggattcaccttcagaagttttggc

SEQ ID NO: 364 - protein, 8 aa, synthetic construct
  REGION 1..8: note = synthetic
GFTFRSFG

SEQ ID NO: 365 - DNA, 24 bp, synthetic construct
  misc_feature 1..24: note = synthetic
  source 1..24: mol_type = other DNA
atatattttgatggaaaaaataaa

SEQ ID NO: 366 - protein, 8 aa, synthetic construct
  REGION 1..8: note = synthetic
IYFDGKNK

SEQ ID NO: 367 - DNA, 33 bp, synthetic construct; identical to SEQ ID NO: 303
  misc_feature 1..33: note = synthetic
  source 1..33: mol_type = other DNA

SEQ ID NO: 368 - protein, 11 aa, synthetic construct
  REGION 1..11: note = synthetic
ARGPGYNWLDP

SEQ ID NO: 369 - DNA, 321 bp, synthetic construct
  misc_feature 1..321: note = synthetic
  source 1..321: mol_type = other DNA
gaaatagtgatgacgcagtctccagccaccctgtctgtgtctccaggggaaagagtcaccctctcctgtagggccagtcagagtattagcaggaacttggcctggtaccagcagaaacctggccaggctcccaggctcctcatctatggtgcatccaccagggccactggtgtcccagccaggttcagtggcagtgggtctgggacagagttcactctcaccatcagcagcctacagtctgaagattttgcagtttttcactgtcagcagtataataataggcctctcactttcggcggagggaccgaggtggagatcaaa

SEQ ID NO: 370 - protein, 107 aa, synthetic construct
  REGION 1..107: note = synthetic
EIVMTQSPATLSVSPGERVTLSCRASQSISRNLAWYQQKPGQAPRLLIYGASTRATGVPARFSGSGSGTEFTLTISSLQSEDFAVFHCQQYNNRPLTFGGGTEVEIK

SEQ ID NO: 371 - DNA, 18 bp, synthetic construct
  misc_feature 1..18: note = synthetic
  source 1..18: mol_type = other DNA
cagagtattagcaggaac

SEQ ID NO: 372 - protein, 6 aa, synthetic construct
  REGION 1..6: note = synthetic
QSISRN

SEQ ID NO: 373-374 - skipped (2 entries)

SEQ ID NO: 375 - DNA, 27 bp, synthetic construct
  misc_feature 1..27: note = synthetic
  source 1..27: mol_type = other DNA
cagcagtataataataggcctctcact

SEQ ID NO: 376 - protein, 9 aa, synthetic construct
  REGION 1..9: note = synthetic
QQYNNRPLT

SEQ ID NO: 377 - DNA, 354 bp, synthetic construct
  misc_feature 1..354: note = synthetic
  source 1..354: mol_type = other DNA
caggtgcaattggtggagtctgggggaggcgtggtccagccggggaggtccctgagactctcctgtgctgcgtctggattcaccttcagaagttttggcatgcactgggtccgccaggctccaggcaggggactggagtgggtggcaatgatatattttgatggaaaaaataaatactatgcagactccgtgaggggccgattcaccatttccagagacaattccaagaacaccctgtatctggaaatgagtagcctgagagccgaggacacggctgtatatttctgtgcgcgagggcctgggtacaactggctcgacccctggggccagggaaccctggtcaccgtctcctca

SEQ ID NO: 378 - protein, 118 aa, synthetic construct; identical to SEQ ID NO: 362
  REGION 1..118: note = synthetic

SEQ ID NO: 379 - DNA, 24 bp, synthetic construct
  misc_feature 1..24: note = synthetic
  source 1..24: mol_type = other DNA
ggattcaccttcagaagttttggc

SEQ ID NO: 380 - protein, 8 aa, synthetic construct
  REGION 1..8: note = synthetic
GFTFRSFG

SEQ ID NO: 381 - DNA, 24 bp, synthetic construct
  misc_feature 1..24: note = synthetic
  source 1..24: mol_type = other DNA
atatattttgatggaaaaaataaa

SEQ ID NO: 382 - protein, 8 aa, synthetic construct
  REGION 1..8: note = synthetic
IYFDGKNK

SEQ ID NO: 383 - DNA, 33 bp, synthetic construct; identical to SEQ ID NO: 303
  misc_feature 1..33: note = synthetic
  source 1..33: mol_type = other DNA

SEQ ID NO: 384 - protein, 11 aa, synthetic construct
  REGION 1..11: note = synthetic
ARGPGYNWLDP

SEQ ID NO: 385 - DNA, 321 bp, synthetic construct
  misc_feature 1..321: note = synthetic
  source 1..321: mol_type = other DNA
gaaatagtgatgacgcagtctccagccaccctgtctgtgtctccaggggaaagagtcaccctctcctgtagggccagtcagagtattagcaggaacttggcctggtaccagcaraaacctggccaggctcccaggctcctcatctatggtgcatccaccagggccactggtgtcccagccaggttcagtggcagtgggtctgggacagagttcactctcaccatcagcagcctacagtctgaagattttgcagtttttcactgtcagcagtataataataggcctctcactttcggcggagggaccgaggtggagatcaaa

SEQ ID NO: 386 - protein, 107 aa, synthetic construct
  REGION 1..107: note = synthetic
  VARIANT 38: note = Xaa = Any Amino Acid
EIVMTQSPATLSVSPGERVTLSCRASQSISRNLAWYQXKPGQAPRLLIYGASTRATGVPARFSGSGSGTEFTLTISSLQSEDFAVFHCQQYNNRPLTFGGGTEVEIK

SEQ ID NO: 387 - DNA, 18 bp, synthetic construct
  misc_feature 1..18: note = synthetic
  source 1..18: mol_type = other DNA
cagagtattagcaggaac

SEQ ID NO: 388 - protein, 6 aa, synthetic construct
  REGION 1..6: note = synthetic
QSISRN

SEQ ID NO: 389-390 - skipped (2 entries)

SEQ ID NO: 391 - DNA, 27 bp, synthetic construct
  misc_feature 1..27: note = synthetic
  source 1..27: mol_type = other DNA
cagcagtataataataggcctctcact

SEQ ID NO: 392 - protein, 9 aa, synthetic construct
  REGION 1..9: note = synthetic
QQYNNRPLT

SEQ ID NO: 393 - DNA, 354 bp, synthetic construct
  misc_feature 1..354: note = synthetic
  source 1..354: mol_type = other DNA
caggtgcaattggtggagtctgggggaggcgtggtccagccggggaggtccctgagactctcctgtgctgcgtctggattcaccttcagaagttttggcatgcactgggtccgccaggctccaggcaggggactggagtgggtggcaatgatatattttgatggaaaaaataaatactatgcagactccgtgaggggccgattcaccatttccagagacaattccaagaacaccctgtatctggaaatgagcagcctgagagccgaggacacggctgtatatttctgtgcgcgagggcctgggtacaattggctcgacccctggggccagggaaccctggtcaccgtctcctca

SEQ ID NO: 394 - protein, 118 aa, synthetic construct; identical to SEQ ID NO: 362
  REGION 1..118: note = synthetic

SEQ ID NO: 395 - DNA, 24 bp, synthetic construct
  misc_feature 1..24: note = synthetic
  source 1..24: mol_type = other DNA
ggattcaccttcagaagttttggc

SEQ ID NO: 396 - protein, 8 aa, synthetic construct
  REGION 1..8: note = synthetic
GFTFRSFG

SEQ ID NO: 397 - DNA, 24 bp, synthetic construct
  misc_feature 1..24: note = synthetic
  source 1..24: mol_type = other DNA
atatattttgatggaaaaaataaa

SEQ ID NO: 398 - protein, 8 aa, synthetic construct
  REGION 1..8: note = synthetic
IYFDGKNK

SEQ ID NO: 399 - DNA, 33 bp, synthetic construct; identical to SEQ ID NO: 319
  misc_feature 1..33: note = synthetic
  source 1..33: mol_type = other DNA

SEQ ID NO: 400 - protein, 11 aa, synthetic construct
  REGION 1..11: note = synthetic
ARGPGYNWLDP

SEQ ID NO: 401 - DNA, 321 bp, synthetic construct
  misc_feature 1..321: note = synthetic
  source 1..321: mol_type = other DNA
gaaatagtgatgacgcagtctccagccaccctgtctgtgtctccaggggaaagagccaccctctcctgtagggccagtcagagtgttagcaggaacttggcctggtaccagcaaaaacctggccaggctcccaggctcctcatctatggtgcatccaccagggccactggtgtcccagccaggttcagtggcagtgggtctgggacagagttcactctcaccatcagcagcctacagtctgaagattttgcagtttttcactgtcagcagtataataataggcctctcactttcggcggagggaccgaggtggagatcaaa

SEQ ID NO: 402 - protein, 107 aa, synthetic construct
  REGION 1..107: note = synthetic
EIVMTQSPATLSVSPGERATLSCRASQSVSRNLAWYQQKPGQAPRLLIYGASTRATGVPARFSGSGSGTEFTLTISSLQSEDFAVFHCQQYNNRPLTFGGGTEVEIK

SEQ ID NO: 403 - DNA, 18 bp, synthetic construct
  misc_feature 1..18: note = synthetic
  source 1..18: mol_type = other DNA
cagagtgttagcaggaac

SEQ ID NO: 404 - protein, 6 aa, synthetic construct
  REGION 1..6: note = synthetic
QSVSRN

SEQ ID NO: 405-406 - skipped (2 entries)

SEQ ID NO: 407 - DNA, 27 bp, synthetic construct
  misc_feature 1..27: note = synthetic
  source 1..27: mol_type = other DNA
cagcagtataataataggcctctcact

SEQ ID NO: 408 - protein, 9 aa, synthetic construct
  REGION 1..9: note = synthetic
QQYNNRPLT

SEQ ID NO: 409 - DNA, 354 bp, synthetic construct; identical to SEQ ID NO: 393
  misc_feature 1..354: note = synthetic
  source 1..354: mol_type = other DNA

SEQ ID NO: 410 - protein, 118 aa, synthetic construct; identical to SEQ ID NO: 362
  REGION 1..118: note = synthetic

SEQ ID NO: 411 - DNA, 24 bp, synthetic construct
  misc_feature 1..24: note = synthetic
  source 1..24: mol_type = other DNA
ggattcaccttcagaagttttggc

SEQ ID NO: 412 - protein, 8 aa, synthetic construct
  REGION 1..8: note = synthetic
GFTFRSFG

SEQ ID NO: 413 - DNA, 24 bp, synthetic construct
  misc_feature 1..24: note = synthetic
  source 1..24: mol_type = other DNA
atatattttgatggaaaaaataaa

SEQ ID NO: 414 - protein, 8 aa, synthetic construct
  REGION 1..8: note = synthetic
IYFDGKNK

SEQ ID NO: 415 - DNA, 33 bp, synthetic construct; identical to SEQ ID NO: 319
  misc_feature 1..33: note = synthetic
  source 1..33: mol_type = other DNA

SEQ ID NO: 416 - protein, 11 aa, synthetic construct
  REGION 1..11: note = synthetic
ARGPGYNWLDP

SEQ ID NO: 417 - DNA, 321 bp, synthetic construct; identical to SEQ ID NO: 401
  misc_feature 1..321: note = synthetic
  source 1..321: mol_type = other DNA

SEQ ID NO: 418 - protein, 107 aa, synthetic construct; identical to SEQ ID NO: 402
  REGION 1..107: note = synthetic

SEQ ID NO: 419 - DNA, 18 bp, synthetic construct
  misc_feature 1..18: note = synthetic
  source 1..18: mol_type = other DNA
cagagtgttagcaggaac

SEQ ID NO: 420 - protein, 6 aa, synthetic construct
  REGION 1..6: note = synthetic
QSVSRN

SEQ ID NO: 421-422 - skipped (2 entries)

SEQ ID NO: 423 - DNA, 27 bp, synthetic construct
  misc_feature 1..27: note = synthetic
  source 1..27: mol_type = other DNA
cagcagtataataataggcctctcact

SEQ ID NO: 424 - protein, 9 aa, synthetic construct
  REGION 1..9: note = synthetic
QQYNNRPLT

SEQ ID NO: 425 - DNA, 354 bp, synthetic construct
  misc_feature 1..354: note = synthetic
  source 1..354: mol_type = other DNA
caggtgcagttggtggagtctgggggaggcgtggtccagcctgggaggtccctgagactctcctgtgttgcgtctggattcaccttcagaagttatggcatgcactgggtccgccaggctccaggcaagggactgcagtgggtggcaatgatttactatgatggtaagaataaatattatgcagactccgtgaggggccgattcaccatctccagagacaattccaagaacacgctgtatctgcaaatgaacagtctgagagccgaagacacggctatgtatttctgtgcgcgagggcctgggtacaactggctcgacccctggggccagggaaccctggtcactgtctcctca

SEQ ID NO: 426 - protein, 118 aa, synthetic construct
  REGION 1..118: note = synthetic
QVQLVESGGGVVQPGRSLRLSCVASGFTFRSYGMHWVRQAPGKGLQWVAMIYYDGKNKYYADSVRGRFTISRDNSKNTLYLQMNSLRAEDTAMYFCARGPGYNWLDPWGQGTLVTVSS

SEQ ID NO: 427 - DNA, 24 bp, synthetic construct
  misc_feature 1..24: note = synthetic
  source 1..24: mol_type = other DNA
ggattcaccttcagaagttatggc

SEQ ID NO: 428 - protein, 8 aa, synthetic construct
  REGION 1..8: note = synthetic
GFTFRSYG

SEQ ID NO: 429 - DNA, 24 bp, synthetic construct
  misc_feature 1..24: note = synthetic
  source 1..24: mol_type = other DNA
atttactatgatggtaagaataaa

SEQ ID NO: 430 - protein, 8 aa, synthetic construct
  REGION 1..8: note = synthetic
IYYDGKNK

SEQ ID NO: 431 - DNA, 33 bp, synthetic construct; identical to SEQ ID NO: 303
  misc_feature 1..33: note = synthetic
  source 1..33: mol_type = other DNA

SEQ ID NO: 432 - protein, 11 aa, synthetic construct
  REGION 1..11: note = synthetic
ARGPGYNWLDP

SEQ ID NO: 433 - DNA, 321 bp, synthetic construct
  misc_feature 1..321: note = synthetic
  source 1..321: mol_type = other DNA
gaaatagtgatgacgcagtctccagccaccctgtctgtgtctccaggggaaagagccaccctctcctgcagggccagtcagagaattagcagcaacttggcctggtaccagcaaaaacctggccaggctcccaggctcctcatctatggtgcatccaccagggccactggtagcccagccaggttcagtggcagtgggtctgggacagagttcactctcaccatcagcagcctgcagtctgaagatgttgcagtttattactgtcagcaacataataactggcctctcactttcggcggagggaccaaggtggagatcaaa

SEQ ID NO: 434 - protein, 107 aa, synthetic construct
  REGION 1..107: note = synthetic
EIVMTQSPATLSVSPGERATLSCRASQRISSNLAWYQQKPGQAPRLLIYGASTRATGSPARFSGSGSGTEFTLTISSLQSEDVAVYYCQQHNNWPLTFGGGTKVEIK

SEQ ID NO: 435 - DNA, 18 bp, synthetic construct
  misc_feature 1..18: note = synthetic
  source 1..18: mol_type = other DNA
cagagaattagcagcaac

SEQ ID NO: 436 - protein, 6 aa, synthetic construct
  REGION 1..6: note = synthetic
QRISSN

SEQ ID NO: 437-438 - skipped (2 entries)

SEQ ID NO: 439 - DNA, 27 bp, synthetic construct
  misc_feature 1..27: note = synthetic
  source 1..27: mol_type = other DNA
cagcaacataataactggcctctcact

SEQ ID NO: 440 - protein, 9 aa, synthetic construct
  REGION 1..9: note = synthetic
QQHNNWPLT

SEQ ID NO: 441 - DNA, 354 bp, synthetic construct
  misc_feature 1..354: note = synthetic
  source 1..354: mol_type = other DNA
caggtgcaattggtggagtctgggggaggcgtggtccagccggggaggtccctgagactctcctgtgctgcgtctggtttcaccttcagaagttttggcatgcactgggtccgccaggctccaggcaggggactggagtgggtggcaatgatatattttgatggaaaaaataaatactatgcagactccgtgaggggccgattcaccatttccagagacaattccaagaacaccctgtatctggaaatgagtagcctgagagccgaggacacggctgtatatttctgtgcgcgagggcctgggtacaactggctcgacccctggggccagggaaccctggtcaccgtctcctca

SEQ ID NO: 442 - protein, 118 aa, synthetic construct; identical to SEQ ID NO: 362
  REGION 1..118: note = synthetic

SEQ ID NO: 443 - DNA, 24 bp, synthetic construct
  misc_feature 1..24: note = synthetic
  source 1..24: mol_type = other DNA
ggtttcaccttcagaagttttggc

SEQ ID NO: 444 - protein, 8 aa, synthetic construct
  REGION 1..8: note = synthetic
GFTFRSFG

SEQ ID NO: 445 - DNA, 24 bp, synthetic construct
  misc_feature 1..24: note = synthetic
  source 1..24: mol_type = other DNA
atatattttgatggaaaaaataaa

SEQ ID NO: 446 - protein, 8 aa, synthetic construct
  REGION 1..8: note = synthetic
IYFDGKNK

SEQ ID NO: 447 - DNA, 33 bp, synthetic construct; identical to SEQ ID NO: 303
  misc_feature 1..33: note = synthetic
  source 1..33: mol_type = other DNA

SEQ ID NO: 448 - protein, 11 aa, synthetic construct
  REGION 1..11: note = synthetic
ARGPGYNWLDP

SEQ ID NO: 449 - DNA, 321 bp, synthetic construct
  misc_feature 1..321: note = synthetic
  source 1..321: mol_type = other DNA
gaaatagtgatgacgcagtctccagccaccctgtctgtgtctccaggggaaagagtcatcctctcctgtagggccagtcagagtattagcaggaacttggcctggtaccagcaaaaacctggccaggctcccaggctcctcatctatggtgcaaccaccagggccactggtgtcccagccaggttcagtggcagtgggtctgggacagagttcactctcaccatcagcagcctacagtctgaagattttgcagttttttactgtcagcagtataataataggcctctcactttcggcggagggaccgaggtggagatcaaa

SEQ ID NO: 450 - protein, 107 aa, synthetic construct
  REGION 1..107: note = synthetic
EIVMTQSPATLSVSPGERVILSCRASQSISRNLAWYQQKPGQAPRLLIYGATTRATGVPARFSGSGSGTEFTLTISSLQSEDFAVFYCQQYNNRPLTFGGGTEVEIK

SEQ ID NO: 451 - DNA, 18 bp, synthetic construct
  misc_feature 1..18: note = synthetic
  source 1..18: mol_type = other DNA
cagagtattagcaggaac

SEQ ID NO: 452 - protein, 6 aa, synthetic construct
  REGION 1..6: note = synthetic
QSISRN

SEQ ID NO: 453-454 - skipped (2 entries)

SEQ ID NO: 455 - DNA, 27 bp, synthetic construct
  misc_feature 1..27: note = synthetic
  source 1..27: mol_type = other DNA
cagcagtataataataggcctctcact

SEQ ID NO: 456 - protein, 9 aa, synthetic construct
  REGION 1..9: note = synthetic
QQYNNRPLT

SEQ ID NO: 457 - DNA, 354 bp, synthetic construct; identical to SEQ ID NO: 441
  misc_feature 1..354: note = synthetic
  source 1..354: mol_type = other DNA

SEQ ID NO: 458 - protein, 118 aa, synthetic construct; identical to SEQ ID NO: 362
  REGION 1..118: note = synthetic

SEQ ID NO: 459 - DNA, 24 bp, synthetic construct
  misc_feature 1..24: note = synthetic
  source 1..24: mol_type = other DNA
ggtttcaccttcagaagttttggc

SEQ ID NO: 460 - protein, 8 aa, synthetic construct
  REGION 1..8: note = synthetic
GFTFRSFG

SEQ ID NO: 461 - DNA, 24 bp, synthetic construct
  misc_feature 1..24: note = synthetic
  source 1..24: mol_type = other DNA
atatattttgatggaaaaaataaa

SEQ ID NO: 462 - protein, 8 aa, synthetic construct
  REGION 1..8: note = synthetic
IYFDGKNK

SEQ ID NO: 463 - DNA, 33 bp, synthetic construct; identical to SEQ ID NO: 303
  misc_feature 1..33: note = synthetic
  source 1..33: mol_type = other DNA

SEQ ID NO: 464 - protein, 11 aa, synthetic construct
  REGION 1..11: note = synthetic
ARGPGYNWLDP

SEQ ID NO: 465 - DNA, 321 bp, synthetic construct
  misc_feature 1..321: note = synthetic
  source 1..321: mol_type = other DNA
gaaatagtgatgacgcagtctccagccaccctgtctgtgtctccaggggaaagagtcatcctctcctgtagggccagtcagagtattagcaggaacttggcctggtaccagcaraaacctggccaggctcccaggctcctcatctatggtgcaaccaccagggccactggtgtcccagccaggttcagtggcagtgggtctgggacagagttcactctcaccatcagcagcctacagtctgaagattttgcagttttttactgtcagcagtataataataggcctctcactttcggcggagggaccgaggtggagatcaaa

SEQ ID NO: 466 - protein, 107 aa, synthetic construct
  REGION 1..107: note = synthetic
  VARIANT 38: note = Xaa = Any Amino Acid
EIVMTQSPATLSVSPGERVILSCRASQSISRNLAWYQXKPGQAPRLLIYGATTRATGVPARFSGSGSGTEFTLTISSLQSEDFAVFYCQQYNNRPLTFGGGTEVEIK

SEQ ID NO: 467 - DNA, 18 bp, synthetic construct
  misc_feature 1..18: note = synthetic
  source 1..18: mol_type = other DNA
cagagtattagcaggaac

SEQ ID NO: 468 - protein, 6 aa, synthetic construct
  REGION 1..6: note = synthetic
QSISRN

SEQ ID NO: 469-470 - skipped (2 entries)

SEQ ID NO: 471 - DNA, 27 bp, synthetic construct
  misc_feature 1..27: note = synthetic
  source 1..27: mol_type = other DNA
cagcagtataataataggcctctcact

SEQ ID NO: 472 - protein, 9 aa, synthetic construct
  REGION 1..9: note = synthetic
QQYNNRPLT

SEQ ID NO: 473 - DNA, 354 bp, synthetic construct; identical to SEQ ID NO: 345
  misc_feature 1..354: note = synthetic
  source 1..354: mol_type = other DNA

SEQ ID NO: 474 - protein, 118 aa, synthetic construct; identical to SEQ ID NO: 346
  REGION 1..118: note = synthetic

SEQ ID NO: 475 - DNA, 24 bp, synthetic construct
  misc_feature 1..24: note = synthetic
  source 1..24: mol_type = other DNA
ggatttaccttcagaagttatggc

SEQ ID NO: 476 - protein, 8 aa, synthetic construct
  REGION 1..8: note = synthetic
GFTFRSYG

SEQ ID NO: 477 - DNA, 24 bp, synthetic construct
  misc_feature 1..24: note = synthetic
  source 1..24: mol_type = other DNA
atatattatgatggaaacaataaa

SEQ ID NO: 478 - protein, 8 aa, synthetic construct
  REGION 1..8: note = synthetic
IYYDGNNK

SEQ ID NO: 479 - DNA, 33 bp, synthetic construct; identical to SEQ ID NO: 303
  misc_feature 1..33: note = synthetic
  source 1..33: mol_type = other DNA

SEQ ID NO: 480 - protein, 11 aa, synthetic construct
  REGION 1..11: note = synthetic
ARGPGYNWLDP

SEQ ID NO: 481 - DNA, 321 bp, synthetic construct; identical to SEQ ID NO: 353
  misc_feature 1..321: note = synthetic
  source 1..321: mol_type = other DNA

SEQ ID NO: 482 - protein, 107 aa, synthetic construct; identical to SEQ ID NO: 354
  REGION 1..107: note = synthetic

SEQ ID NO: 483 - DNA, 18 bp, synthetic construct
  misc_feature 1..18: note = synthetic
  source 1..18: mol_type = other DNA
cagagtgttagcagcaac

SEQ ID NO: 484 - protein, 6 aa, synthetic construct
  REGION 1..6: note = synthetic
QSVSSN

SEQ ID NO: 485-486 - skipped (2 entries)

SEQ ID NO: 487 - DNA, 27 bp, synthetic construct
  misc_feature 1..27: note = synthetic
  source 1..27: mol_type = other DNA
cagcagtataataacaggcctctcact

SEQ ID NO: 488 - protein, 9 aa, synthetic construct
  REGION 1..9: note = synthetic
QQYNNRPLT

SEQ ID NO: 489 - DNA, 372 bp, synthetic construct
  misc_feature 1..372: note = synthetic
  source 1..372: mol_type = other DNA
gaagtgcagctggtggagtctgggggaggcttggtacagcctggcaggtccctgagactctcctgtgcagcctctggattcacctttgatgattattccatgcactgggtccggcaagctccagggaagggcctggagtgggtctcaggtattagttggaatagtcgtagcatagactatgcggactctgtgaagggccgattcaccatctccagagacaacgccaagaactccctgtatctgcaaatgaacagtctgagagctgaggacacggccttgtattactgtgtaaaagataatagtggctatggccgctattactactacgggatggacgtctggggccaagggaccacggtctccgtctcctca

SEQ ID NO: 490 - protein, 124 aa, synthetic construct
  REGION 1..124: note = synthetic
EVQLVESGGGLVQPGRSLRLSCAASGFTFDDYSMHWVRQAPGKGLEWVSGISWNSRSIDYADSVKGRFTISRDNAKNSLYLQMNSLRAEDTALYYCVKDNSGYGRYYYYGMDVWGQGTTVSVSS

SEQ ID NO: 491 - DNA, 24 bp, synthetic construct
  misc_feature 1..24: note = synthetic
  source 1..24: mol_type = other DNA
ggattcacctttgatgattattcc

SEQ ID NO: 492 - protein, 8 aa, synthetic construct
  REGION 1..8: note = synthetic
GFTFDDYS

SEQ ID NO: 493 - DNA, 24 bp, synthetic construct
  misc_feature 1..24: note = synthetic
  source 1..24: mol_type = other DNA
attagttggaatagtcgtagcata

SEQ ID NO: 494 - protein, 8 aa, synthetic construct
  REGION 1..8: note = synthetic
ISWNSRSI

SEQ ID NO: 495 - DNA, 51 bp, synthetic construct
  misc_feature 1..51: note = synthetic
  source 1..51: mol_type = other DNA
gtaaaagataatagtggctatggccgctattactactacgggatggacgtc

SEQ ID NO: 496 - protein, 17 aa, synthetic construct
  REGION 1..17: note = synthetic
VKDNSGYGRYYYYGMDV

SEQ ID NO: 497 - DNA, 321 bp, synthetic construct
  misc_feature 1..321: note = synthetic
  source 1..321: mol_type = other DNA
aaaatagtgatgacgcagtctcccgccaccctgtctgtgtctccaggggaaagagccaccctctcctgcagggccagtcagagtgttagcggcaacttagcctggtaccagcaaaaacctggccaggctcccaggctcctcatctatggtgcatccaccagggccactagtatcccagccaggttcagtggcagtgggtctgggacagagttcactctcaccatcagcagcctgcagtctgaagattttgcagtttatttctgtcagcactattataactggcctctcactttcggcggagggaccaaggtggagatcaga

SEQ ID NO: 498 - protein, 107 aa, synthetic construct
  REGION 1..107: note = synthetic
KIVMTQSPATLSVSPGERATLSCRASQSVSGNLAWYQQKPGQAPRLLIYGASTRATSIPARFSGSGSGTEFTLTISSLQSEDFAVYFCQHYYNWPLTFGGGTKVEIR

SEQ ID NO: 499 - DNA, 18 bp, synthetic construct
  misc_feature 1..18: note = synthetic
  source 1..18: mol_type = other DNA
cagagtgttagcggcaac

SEQ ID NO: 500 - protein, 6 aa, synthetic construct
  REGION 1..6: note = synthetic
QSVSGN

SEQ ID NO: 501-502 - skipped (2 entries)

SEQ ID NO: 503 - DNA, 27 bp, synthetic construct
  misc_feature 1..27: note = synthetic
  source 1..27: mol_type = other DNA
cagcactattataactggcctctcact

SEQ ID NO: 504 - protein, 9 aa, synthetic construct
  REGION 1..9: note = synthetic
QHYYNWPLT

SEQ ID NO: 505 - DNA, 369 bp, synthetic construct; identical to SEQ ID NO: 153
  misc_feature 1..369: note = synthetic
  source 1..369: mol_type = other DNA

SEQ ID NO: 506 - protein, 123 aa, synthetic construct; identical to SEQ ID NO: 154
  REGION 1..123: note = synthetic

SEQ ID NO: 507 - DNA, 24 bp, synthetic construct
  misc_feature 1..24: note = synthetic
  source 1..24: mol_type = other DNA
ggattcacctttgatgattttacc

SEQ ID NO: 508 - protein, 8 aa, synthetic construct
  REGION 1..8: note = synthetic
GFTFDDFT

SEQ ID NO: 509 - DNA, 24 bp, synthetic construct
  misc_feature 1..24: note = synthetic
  source 1..24: mol_type = other DNA
atcagttggaatagtggtagcata

SEQ ID NO: 510 - protein, 8 aa, synthetic construct
  REGION 1..8: note = synthetic
ISWNSGSI

SEQ ID NO: 511 - DNA, 48 bp, synthetic construct; identical to SEQ ID NO: 159
  misc_feature 1..48: note = synthetic
  source 1..48: mol_type = other DNA

SEQ ID NO: 512 - protein, 16 aa, synthetic construct
  REGION 1..16: note = synthetic
AKDNSGYGYYYYGMDV

SEQ ID NO: 513 - DNA, 339 bp, synthetic construct
  misc_feature 1..339: note = synthetic
  source 1..339: mol_type = other DNA
gacatcgtgatgacccagtctccagactccctggctgtgtctctgggcgagagggccaccatcaactgcaagtccagccagagtgttttatacagctccaacaataagaactacttagcttggtaccagcagaaaccaggacagcctcctaagctgctcatttactgggcatctacccgggaatccggggtccctgaccgattcagtggcagcgggtctgggacagatttcactctcaccatcagcagcctgcaggctgaagatgtggcagtttattactgtcagcaatattatagtactccgtacacttttggccaggggaccaagctggagatcaaa

SEQ ID NO: 514 - protein, 113 aa, synthetic construct
  REGION 1..113: note = synthetic
DIVMTQSPDSLAVSLGERATINCKSSQSVLYSSNNKNYLAWYQQKPGQPPKLLIYWASTRESGVPDRFSGSGSGTDFTLTISSLQAEDVAVYYCQQYYSTPYTFGQGTKLEIK

SEQ ID NO: 515 - DNA, 36 bp, synthetic construct
  misc_feature 1..36: note = synthetic
  source 1..36: mol_type = other DNA
cagagtgttttatacagctccaacaataagaactac

SEQ ID NO: 516 - protein, 12 aa, synthetic construct
  REGION 1..12: note = synthetic
QSVLYSSNNKNY

SEQ ID NO: 517-518 - skipped (2 entries)

SEQ ID NO: 519 - DNA, 27 bp, synthetic construct
  misc_feature 1..27: note = synthetic
  source 1..27: mol_type = other DNA
cagcaatattatagtactccgtacact

SEQ ID NO: 520 - protein, 9 aa, synthetic construct
  REGION 1..9: note = synthetic
QQYYSTPYT

SEQ ID NO: 521 - DNA, 369 bp, synthetic construct
  misc_feature 1..369: note = synthetic
  source 1..369: mol_type = other DNA
caggtcaccttgaaggagtctggtcctgcgctggtgaaacccacacagaccctcacactgacctgcaccttctctgggttctcactcagcactagtggaatgtgtgtgagctggatccgtcagcccccagggaaggccctggagtggcttgcacgcattgattgggatgatgataaatactacagcacatctctgaagaccaggctcaccatctccaaggacacctccaaaaaccaggtggtccttacaatgaccaacatggaccctgtggacacagccacgtattactgtgcacggatggatatagtgggagctagaggggggtggttcgacccctggggccagggaaccctggtcaccgtctcctca

SEQ ID NO: 522 - protein, 123 aa, synthetic construct
  REGION 1..123: note = synthetic
QVTLKESGPALVKPTQTLTLTCTFSGFSLSTSGMCVSWIRQPPGKALEWLARIDWDDDKYYSTSLKTRLTISKDTSKNQVVLTMTNMDPVDTATYYCARMDIVGARGGWFDPWGQGTLVTVSS

SEQ ID NO: 523 - DNA, 30 bp, synthetic construct
  misc_feature 1..30: note = synthetic
  source 1..30: mol_type = other DNA
gggttctcactcagcactagtggaatgtgt

SEQ ID NO: 524 - protein, 10 aa, synthetic construct
  REGION 1..10: note = synthetic
GFSLSTSGMC

SEQ ID NO: 525 - DNA, 21 bp, synthetic construct
  misc_feature 1..21: note = synthetic
  source 1..21: mol_type = other DNA
attgattgggatgatgataaa

SEQ ID NO: 526 - protein, 7 aa, synthetic construct
  REGION 1..7: note = synthetic
IDWDDDK

SEQ ID NO: 527 - DNA, 45 bp, synthetic construct
  misc_feature 1..45: note = synthetic
  source 1..45: mol_type = other DNA
gcacggatggatatagtgggagctagaggggggtggttcgacccc

SEQ ID NO: 528 - protein, 15 aa, synthetic construct
  REGION 1..15: note = synthetic
ARMDIVGARGGWFDP

SEQ ID NO: 529 - DNA, 321 bp, synthetic construct
  misc_feature 1..321: note = synthetic
  source 1..321: mol_type = other DNA
gacatccagatgacccagtctccatcctcactgtctgcatctgtaggagacagagtcaccatcacttgtcgggcgagtcagggcattagcaattatttagcctggtttcagcagaaaccagggaaagcccctaagtccctgatctatgctgcatccagtttgcaaagtggggtcccatcaaagttcagcggcagtggatctgggacagatttcactctcaccatcagcagcctgcagcctgaagattttgcaacttattactgccaacagtataatagttacccgctcactttcggcggagggaccaaggtggagatcaaa

SEQ ID NO: 530 - protein, 107 aa, synthetic construct
  REGION 1..107: note = synthetic
DIQMTQSPSSLSASVGDRVTITCRASQGISNYLAWFQQKPGKAPKSLIYAASSLQSGVPSKFSGSGSGTDFTLTISSLQPEDFATYYCQQYNSYPLTFGGGTKVEIK

SEQ ID NO: 531 - DNA, 18 bp, synthetic construct
  misc_feature 1..18: note = synthetic
  source 1..18: mol_type = other DNA
cagggcattagcaattat

SEQ ID NO: 532 - protein, 6 aa, synthetic construct
  REGION 1..6: note = synthetic
QGISNY

SEQ ID NO: 533-534 - skipped (2 entries)

SEQ ID NO: 535 - DNA, 27 bp, synthetic construct
  misc_feature 1..27: note = synthetic
  source 1..27: mol_type = other DNA
caacagtataatagttacccgctcact

SEQ ID NO: 536 - protein, 9 aa, synthetic construct
  REGION 1..9: note = synthetic
QQYNSYPLT

SEQ ID NO: 537 - DNA, 404 bp, synthetic construct
  misc_feature 1..404: note = synthetic
  source 1..404: mol_type = other DNA
caggtgcagttggtggagtctgggggaggcgtggtccagcctgggaggtccctgagactctcctgtgctgcgtctggattcaccttcagaagttatggcatgcactgggtccgccaggctccaggcaaggggctggagtgggtggcaatgatatattatgatggaaataataaaaagtatgcagactccgtgaggggccgattcaccatttccagagacaattccaagaacacgctgtatctgcaaatgaacagcctgagagtcgaggacacggctgtgtatttctgtgcgcgagggcctgggtacaactggctcgacccctggggccagggaaccctggtcaccgtctcctcagccaaaacaacagccccacccgtttatccactggcccctggaagcttggg

SEQ ID NO: 538 - protein, 134 aa, synthetic construct
  REGION 1..134: note = synthetic
QVQLVESGGGVVQPGRSLRLSCAASGFTFRSYGMHWVRQAPGKGLEWVAMIYYDGNNKKYADSVRGRFTISRDNSKNTLYLQMNSLRVEDTAVYFCARGPGYNWLDPWGQGTLVTVSSAKTTAPPVYPLAPGSL

SEQ ID NO: 539 - DNA, 24 bp, synthetic construct
  misc_feature 1..24: note = synthetic
  source 1..24: mol_type = other DNA
ggattcaccttcagaagttatggc

SEQ ID NO: 540 - protein, 8 aa, synthetic construct
  REGION 1..8: note = synthetic
GFTFRSYG

SEQ ID NO: 541 - DNA, 24 bp, synthetic construct
  misc_feature 1..24: note = synthetic
  source 1..24: mol_type = other DNA
atatattatgatggaaataataaa

SEQ ID NO: 542 - protein, 8 aa, synthetic construct
  REGION 1..8: note = synthetic
IYYDGNNK

SEQ ID NO: 543 - DNA, 33 bp, synthetic construct; identical to SEQ ID NO: 303
  misc_feature 1..33: note = synthetic
  source 1..33: mol_type = other DNA

SEQ ID NO: 544 - protein, 11 aa, synthetic construct
  REGION 1..11: note = synthetic
ARGPGYNWLDP

SEQ ID NO: 545 - DNA, 321 bp, synthetic construct
  misc_feature 1..321: note = synthetic
  source 1..321: mol_type = other DNA
gaaatagtgatgacgcagtctccagccaccctgtctgtgtctccaggggaaagagccaccctctcctgcagggccagtcagagtgttagcaggaacttggcctggtaccagcagaaacctggccaggctcccaggctcctcatctatggtgcatccaccagggccactgatatcccagccaggttcagtggcagtgggtctgggacagagttcattctcaacatcagcagcctgcagtctgaagattttgcactttattactgtcaacaatatagtaactggcctctcactttcggcggagggaccgaggtggagatcaaa

SEQ ID NO: 546 - protein, 107 aa, synthetic construct
  REGION 1..107: note = synthetic
EIVMTQSPATLSVSPGERATLSCRASQSVSRNLAWYQQKPGQAPRLLIYGASTRATDIPARFSGSGSGTEFILNISSLQSEDFALYYCQQYSNWPLTFGGGTEVEIK

SEQ ID NO: 547 - DNA, 18 bp, synthetic construct
  misc_feature 1..18: note = synthetic
  source 1..18: mol_type = other DNA
cagagtgttagcaggaac

SEQ ID NO: 548 - protein, 6 aa, synthetic construct
  REGION 1..6: note = synthetic
QSVSRN

SEQ ID NO: 549-550 - skipped (2 entries)

SEQ ID NO: 551 - DNA, 27 bp, synthetic construct
  misc_feature 1..27: note = synthetic
  source 1..27: mol_type = other DNA
caacaatatagtaactggcctctcact

SEQ ID NO: 552 - protein, 9 aa, synthetic construct
  REGION 1..9: note = synthetic
QQYSNWPLT

SEQ ID NO: 553 - DNA, 354 bp, synthetic construct; identical to SEQ ID NO: 441
  misc_feature 1..354: note = synthetic
  source 1..354: mol_type = other DNA

SEQ ID NO: 554 - protein, 118 aa, synthetic construct; identical to SEQ ID NO: 362
  REGION 1..118: note = synthetic

SEQ ID NO: 555 - DNA, 24 bp, synthetic construct
  misc_feature 1..24: note = synthetic
  source 1..24: mol_type = other DNA
ggtttcaccttcagaagttttggc

SEQ ID NO: 556 - protein, 8 aa, synthetic construct
  REGION 1..8: note = synthetic
GFTFRSFG

SEQ ID NO: 557 - DNA, 24 bp, synthetic construct
  misc_feature 1..24: note = synthetic
  source 1..24: mol_type = other DNA
atatattttgatggaaaaaataaa

SEQ ID NO: 558 - protein, 8 aa, synthetic construct
  REGION 1..8: note = synthetic
IYFDGKNK

SEQ ID NO: 559 - DNA, 33 bp, synthetic construct; identical to SEQ ID NO: 303
  misc_feature 1..33: note = synthetic
  source 1..33: mol_type = other DNA

SEQ ID NO: 560 - protein, 11 aa, synthetic construct
  REGION 1..11: note = synthetic
ARGPGYNWLDP

SEQ ID NO: 561 - DNA, 321 bp, synthetic construct
  misc_feature 1..321: note = synthetic
  source 1..321: mol_type = other DNA
gaaatagtgatgacgcagtctccagccaccctgtctgtgtctccaggggaaagagtcatcctctcctgtagggccagtcagagtattagcaggaacttggcctggtaccagcagaaacctggccaggctcccaggctcctcatctatggtgcaaccaccagggccactggtgtcccagccaggttcagtggcagtgggtctgggacagagttcactctcaccatcagcagcctacagtctgaagattttgcagttttttactgtcagcagtataataataggcctctcactttcggcggagggaccgaggtggagatcaaa

SEQ ID NO: 562 - protein, 107 aa, synthetic construct; identical to SEQ ID NO: 450
  REGION 1..107: note = synthetic

SEQ ID NO: 563 - DNA, 18 bp, synthetic construct
  misc_feature 1..18: note = synthetic
  source 1..18: mol_type = other DNA
cagagtattagcaggaac

SEQ ID NO: 564 - protein, 6 aa, synthetic construct
  REGION 1..6: note = synthetic
QSISRN

SEQ ID NO: 565-566 - skipped (2 entries)

SEQ ID NO: 567 - DNA, 27 bp, synthetic construct
  misc_feature 1..27: note = synthetic
  source 1..27: mol_type = other DNA
cagcagtataataataggcctctcact

SEQ ID NO: 568 - protein, 9 aa, synthetic construct
  REGION 1..9: note = synthetic
QQYNNRPLT

SEQ ID NO: 569 - DNA, 354 bp, synthetic construct; identical to SEQ ID NO: 441
  misc_feature 1..354: note = synthetic
  source 1..354: mol_type = other DNA

SEQ ID NO: 570 - protein, 118 aa, synthetic construct; identical to SEQ ID NO: 362
  REGION 1..118: note = synthetic

SEQ ID NO: 571 - DNA, 24 bp, synthetic construct
  misc_feature 1..24: note = synthetic
  source 1..24: mol_type = other DNA
ggtttcaccttcagaagttttggc

SEQ ID NO: 572 - protein, 8 aa, synthetic construct
  REGION 1..8: note = synthetic
GFTFRSFG

SEQ ID NO: 573 - DNA, 24 bp, synthetic construct
  misc_feature 1..24: note = synthetic
  source 1..24: mol_type = other DNA
atatattttgatggaaaaaataaa

SEQ ID NO: 574 - protein, 8 aa, synthetic construct
  REGION 1..8: note = synthetic
IYFDGKNK

SEQ ID NO: 575 - DNA, 33 bp, synthetic construct; identical to SEQ ID NO: 303
  misc_feature 1..33: note = synthetic
  source 1..33: mol_type = other DNA

SEQ ID NO: 576 - protein, 11 aa, synthetic construct
  REGION 1..11: note = synthetic
ARGPGYNWLDP

SEQ ID NO: 577 - DNA, 321 bp, synthetic construct; identical to SEQ ID NO: 561
  misc_feature 1..321: note = synthetic
  source 1..321: mol_type = other DNA

SEQ ID NO: 578 - protein, 107 aa, synthetic construct; identical to SEQ ID NO: 450
  REGION 1..107: note = synthetic

SEQ ID NO: 579 - DNA, 18 bp, synthetic construct
  misc_feature 1..18: note = synthetic
  source 1..18: mol_type = other DNA
cagagtattagcaggaac

SEQ ID NO: 580 - protein, 6 aa, synthetic construct
  REGION 1..6: note = synthetic
QSISRN

SEQ ID NO: 581-582 - skipped (2 entries)

SEQ ID NO: 583 - DNA, 27 bp, synthetic construct
  misc_feature 1..27: note = synthetic
  source 1..27: mol_type = other DNA
cagcagtataataataggcctctcact

SEQ ID NO: 584 - protein, 9 aa, synthetic construct
  REGION 1..9: note = synthetic
QQYNNRPLT

SEQ ID NO: 585 - DNA, 351 bp, synthetic construct
  misc_feature 1..351: note = synthetic
  source 1..351: mol_type = other DNA
caggtgcacctggaagagtctgggggaggcgtggtccagcctgggaggtccctgagactctcctgttcagcgtctggtttcaccttcagtagttatgccatgcactgggtccgccaggctccaggcaaggggctggagtgggtggcagttatatggtatgatggaactaataaatattatttagattccgtgaagggccgattcaccatctccagagacaattccaagaacacgctgtttctgcaaatgaacagcctgagagccgaagacacggctgtgtattactgtgcgagagatcggggaagtataataacccactggggccagggaaccctggtcaccgtctcctca

SEQ ID NO: 586 - protein, 117 aa, synthetic construct
  REGION 1..117: note = synthetic
QVHLEESGGGVVQPGRSLRLSCSASGFTFSSYAMHWVRQAPGKGLEWVAVIWYDGTNKYYLDSVKGRFTISRDNSKNTLFLQMNSLRAEDTAVYYCARDRGSIITHWGQGTLVTVSS

SEQ ID NO: 587 - DNA, 24 bp, synthetic construct
  misc_feature 1..24: note = synthetic
  source 1..24: mol_type = other DNA
ggtttcaccttcagtagttatgcc

SEQ ID NO: 588 - protein, 8 aa, synthetic construct
  REGION 1..8: note = synthetic
GFTFSSYA

SEQ ID NO: 589 - DNA, 24 bp, synthetic construct
  misc_feature 1..24: note = synthetic
  source 1..24: mol_type = other DNA
atatggtatgatggaactaataaa

SEQ ID NO: 590 - protein, 8 aa, synthetic construct
  REGION 1..8: note = synthetic
IWYDGTNK

SEQ ID NO: 591 - DNA, 30 bp, synthetic construct
  misc_feature 1..30: note = synthetic
  source 1..30: mol_type = other DNA
gcgagagatcggggaagtataataacccac

SEQ ID NO: 592 - protein, 10 aa, synthetic construct
  REGION 1..10: note = synthetic
ARDRGSIITH

SEQ ID NO: 593 - DNA, 324 bp, synthetic construct
  misc_feature 1..324: note = synthetic
  source 1..324: mol_type = other DNA
gacatccagatgacccagtctccatcctccctgtctgcatctataggagacagagtcaccatcacttgccgggcaagtcagaacattagcagctatttaaattggtatcagcagaaaccagggaaagcccctaagctcctgatctatgctgcatccagtttgcaaagtggggtcccatcaaggttcagtggcagtggatctgggacagatttcactctcaccatcagcagtctgcaacctgaagattttgcaacttactactgtcaacagacttacagtacccctccgatcaccttcggccaagggacacgactggagattaaa

SEQ ID NO: 594 - protein, 108 aa, synthetic construct
  REGION 1..108: note = synthetic
DIQMTQSPSSLSASIGDRVTITCRASQNISSYLNWYQQKPGKAPKLLIYAASSLQSGVPSRFSGSGSGTDFTLTISSLQPEDFATYYCQQTYSTPPITFGQGTRLEIK

SEQ ID NO: 595 - DNA, 18 bp, synthetic construct
  misc_feature 1..18: note = synthetic
  source 1..18: mol_type = other DNA
cagaacattagcagctat

SEQ ID NO: 596 - protein, 6 aa, synthetic construct
  REGION 1..6: note = synthetic
QNISSY

SEQ ID NO: 597-598 - skipped (2 entries)

SEQ ID NO: 599 - DNA, 30 bp, synthetic construct
  misc_feature 1..30: note = synthetic
  source 1..30: mol_type = other DNA
caacagacttacagtacccctccgatcacc

SEQ ID NO: 600 - protein, 10 aa, synthetic construct
  REGION 1..10: note = synthetic
QQTYSTPPIT

SEQ ID NO: 601 - DNA, 372 bp, synthetic construct
  misc_feature 1..372: note = synthetic
  source 1..372: mol_type = other DNA
gaagtacagctggtggagtctgggggaggcttggtacggcctggcaggtccctgagactctcctgtgcagcctctggattcacctttgatgattataccatgcactgggtccgccaagctccagggaagggcctggagtgggtctcagatattagttggaatagtgggaccataggctatgcggactctgtgaagggccgattcaccatctccagagacaacgccaagaactccctgtatctgcaaatgaacagtctgagacctgaggacacggccttgtattactgtgcaaaagatatgagtggctacgcccactactactactacggtatggacgtctggggccaagggaccacggtcaccgtctcctca

SEQ ID NO: 602 - protein, 124 aa, synthetic construct
  REGION 1..124: note = synthetic
EVQLVESGGGLVRPGRSLRLSCAASGFTFDDYTMHWVRQAPGKGLEWVSDISWNSGTIGYADSVKGRFTISRDNAKNSLYLQMNSLRPEDTALYYCAKDMSGYAHYYYYGMDVWGQGTTVTVSS

SEQ ID NO: 603 - DNA, 24 bp, synthetic construct
  misc_feature 1..24: note = synthetic
  source 1..24: mol_type = other DNA
ggattcacctttgatgattatacc

SEQ ID NO: 604 - protein, 8 aa, synthetic construct
  REGION 1..8: note = synthetic
GFTFDDYT

SEQ ID NO: 605 - DNA, 24 bp, synthetic construct
  misc_feature 1..24: note = synthetic
  source 1..24: mol_type = other DNA
attagttggaatagtgggaccata

SEQ ID NO: 606 - protein, 8 aa, synthetic construct
  REGION 1..8: note = synthetic
ISWNSGTI

SEQ ID NO: 607 - DNA, 51 bp, synthetic construct
  misc_feature 1..51: note = synthetic
  source 1..51: mol_type = other DNA
gcaaaagatatgagtggctacgcccactactactactacggtatggacgtc

SEQ ID NO: 608 - protein, 17 aa, synthetic construct
  REGION 1..17: note = synthetic
AKDMSGYAHYYYYGMDV

SEQ ID NO: 609 - DNA, 324 bp, synthetic construct
  misc_feature 1..324: note = synthetic
  source 1..324: mol_type = other DNA
gacatccagatgacccagtctccatcctccctgtctgcatctgtaggagacagagtcaccatcacttgccgggcaagtcagagcattagcagctatttaaattggtatcagcagaaaccagggaaagcccctaagctcctgatctatgctgcatccagtttgcaaagtggggtcccatcaaggttcagtggcagtggatctgggacagatttcactctcaccatcagcagtctgcaacctgaagattttgcaacttactactgtcaacagagttacagtacccctccgatcaccttcggccaagggacacgactggagattaaa

SEQ ID NO: 610 - protein, 108 aa, synthetic construct
  REGION 1..108: note = synthetic
DIQMTQSPSSLSASVGDRVTITCRASQSISSYLNWYQQKPGKAPKLLIYAASSLQSGVPSRFSGSGSGTDFTLTISSLQPEDFATYYCQQSYSTPPITFGQGTRLEIK

SEQ ID NO: 611 - DNA, 18 bp, synthetic construct
  misc_feature 1..18: note = synthetic
  source 1..18: mol_type = other DNA
cagagcattagcagctat

SEQ ID NO: 612 - protein, 6 aa, synthetic construct
  REGION 1..6: note = synthetic
QSISSY

SEQ ID NO: 613-614 - skipped (2 entries)

SEQ ID NO: 615 - DNA, 30 bp, synthetic construct; identical to SEQ ID NO: 199
  misc_feature 1..30: note = synthetic
  source 1..30: mol_type = other DNA

SEQ ID NO: 616 - protein, 10 aa, synthetic construct
  REGION 1..10: note = synthetic
QQSYSTPPIT

SEQ ID NO: 617 - DNA, 372 bp, synthetic construct
  misc_feature 1..372: note = synthetic
  source 1..372: mol_type = other DNA
gaagtgcagctggtggagtctgggggaggcttggtacagcctggcaggtccctgagactctcctgtgcagcctctggattcacctttgatgattataccatgcactgggtccggcaagctccagggaagggcctggagtgggtctccgatattagttggaatagtggtagcataggctatgcggactctgtgaagggccgattcaccgtctccagagacaacgccaagaactccctgtatctgcaaatgaacagtctgagaggtgaggacacggccctgtattactgtgcaaaagatatgagtggctacgcccactacggctactacggtatggacgtctggggccaagggaccacggtcaccgtctcctca

SEQ ID NO: 618 - protein, 124 aa, synthetic construct
  REGION 1..124: note = synthetic
EVQLVESGGGLVQPGRSLRLSCAASGFTFDDYTMHWVRQAPGKGLEWVSDISWNSGSIGYADSVKGRFTVSRDNAKNSLYLQMNSLRGEDTALYYCAKDMSGYAHYGYYGMDVWGQGTTVTVSS

SEQ ID NO: 619 - DNA, 24 bp, synthetic construct
  misc_feature 1..24: note = synthetic
  source 1..24: mol_type = other DNA
ggattcacctttgatgattatacc

SEQ ID NO: 620 - protein, 8 aa, synthetic construct
  REGION 1..8: note = synthetic
GFTFDDYT

SEQ ID NO: 621 - DNA, 24 bp, synthetic construct
  misc_feature 1..24: note = synthetic
  source 1..24: mol_type = other DNA
attagttggaatagtggtagcata

SEQ ID NO: 622 - protein, 8 aa, synthetic construct
  REGION 1..8: note = synthetic
ISWNSGSI

SEQ ID NO: 623 - DNA, 51 bp, synthetic construct
  misc_feature 1..51: note = synthetic
  source 1..51: mol_type = other DNA
gcaaaagatatgagtggctacgcccactacggctactacggtatggacgtc

SEQ ID NO: 624 - protein, 17 aa, synthetic construct
  REGION 1..17: note = synthetic
AKDMSGYAHYGYYGMDV

SEQ ID NO: 625 - DNA, 324 bp, synthetic construct
  misc_feature 1..324: note = synthetic
  source 1..324: mol_type = other DNA
gacatccagatgacccagtctccatcctccctgtctgcatctgtaggagacagagtcaccatcacttgccgggcaagtcagagcattaggaactatttaaattggtatcagcagaaaccagggaaagtccctaagctcctgatctatgctgcatccagtttgcaaagtggggtcccatcaaggttcagtggcagtggatctgggacagatttcactctcaccatcagcagtctgcaacctgaagattttgcaacttactactgtcaacagagttacagtaaccctccgatcaccttcggccaagggacacgactggagattaaa

SEQ ID NO: 626 - protein, 108 aa, synthetic construct
  REGION 1..108: note = synthetic
DIQMTQSPSSLSASVGDRVTITCRASQSIRNYLNWYQQKPGKVPKLLIYAASSLQSGVPSRFSGSGSGTDFTLTISSLQPEDFATYYCQQSYSNPPITFGQGTRLEIK

SEQ ID NO: 627 - DNA, 18 bp, synthetic construct
  misc_feature 1..18: note = synthetic
  source 1..18: mol_type = other DNA
cagagcattaggaactat

SEQ ID NO: 628 - protein, 6 aa, synthetic construct
  REGION 1..6: note = synthetic
QSIRNY

SEQ ID NO: 629-630 - skipped (2 entries)

SEQ ID NO: 631 - DNA, 30 bp, synthetic construct
  misc_feature 1..30: note = synthetic
  source 1..30: mol_type = other DNA
caacagagttacagtaaccctccgatcacc

SEQ ID NO: 632 - protein, 10 aa, synthetic construct
  REGION 1..10: note = synthetic
QQSYSNPPIT

SEQ ID NO: 633 - DNA, 369 bp, synthetic construct
  misc_feature 1..369: note = synthetic
  source 1..369: mol_type = other DNA
gaagcgcagctggtggaatctgggggaggcttggtacagcctggcaggtccctgagactctcctgtacaacctctggattcacctttgatgattataccatgcactgggtccggcaagctccagggaagggcctggagtggatctctgatattagttggaatggtggaaccaaaggctatgcggactctgtgaagggccgattcaccatctccagagacaacgccaaaaactccctgtatctgcaaatggacagtctgagaggtgaggacacggccttatattactgtgtaaaagataaaagtggctacgggcacttctacttcggtttggacgtctggggccaagggaccacggtcaccgtctcctca

SEQ ID NO: 634 - protein, 123 aa, synthetic construct
  REGION 1..123: note = synthetic
EAQLVESGGGLVQPGRSLRLSCTTSGFTFDDYTMHWVRQAPGKGLEWISDISWNGGTKGYADSVKGRFTISRDNAKNSLYLQMDSLRGEDTALYYCVKDKSGYGHFYFGLDVWGQGTTVTVSS

SEQ ID NO: 635 - DNA, 24 bp, synthetic construct
  misc_feature 1..24: note = synthetic
  source 1..24: mol_type = other DNA
ggattcacctttgatgattatacc

SEQ ID NO: 636 - protein, 8 aa, synthetic construct
  REGION 1..8: note = synthetic
GFTFDDYT

SEQ ID NO: 637 - DNA, 24 bp, synthetic construct
  misc_feature 1..24: note = synthetic
  source 1..24: mol_type = other DNA
attagttggaatggtggaaccaaa

SEQ ID NO: 638 - protein, 8 aa, synthetic construct
  REGION 1..8: note = synthetic
ISWNGGTK

SEQ ID NO: 639 - DNA, 48 bp, synthetic construct
  misc_feature 1..48: note = synthetic
  source 1..48: mol_type = other DNA
gtaaaagataaaagtggctacgggcacttctacttcggtttggacgtc

SEQ ID NO: 640 - protein, 16 aa, synthetic construct
  REGION 1..16: note = synthetic
VKDKSGYGHFYFGLDV

SEQ ID NO: 641 - DNA, 324 bp, synthetic construct
  misc_feature 1..324: note = synthetic
  source 1..324: mol_type = other DNA
gacatccagatgacccagtctccatcctccctgactgcgtctgtaggagacagagtcaccttcacttgccgggcaagtcagagcattagcaggcatttaagttggtatcagcagaaaccagggaaagcccctaagctcctgatctatgctgcatccagtttggaaagtggggtcccttcaaggttcagtggcagtggatctgggacagatttcactctcaccatcagcagtctgcaccctgaagattttgcaacttactactgtcaacagagctacagtaaccctccgatcaccttcggccaagggacacgactggagattaaa

SEQ ID NO: 642 - protein, 108 aa, synthetic construct
  REGION 1..108: note = synthetic
DIQMTQSPSSLTASVGDRVTFTCRASQSISRHLSWYQQKPGKAPKLLIYAASSLESGVPSRFSGSGSGTDFTLTISSLHPEDFATYYCQQSYSNPPITFGQGTRLEIK

SEQ ID NO: 643 - DNA, 18 bp, synthetic construct
  misc_feature 1..18: note = synthetic
  source 1..18: mol_type = other DNA
cagagcattagcaggcat

SEQ ID NO: 644 - protein, 6 aa, synthetic construct
  REGION 1..6: note = synthetic
QSISRH

SEQ ID NO: 645-646 - skipped (2 entries)

SEQ ID NO: 647 - DNA, 30 bp, synthetic construct
  misc_feature 1..30: note = synthetic
  source 1..30: mol_type = other DNA
caacagagctacagtaaccctccgatcacc

SEQ ID NO: 648 - protein, 10 aa, synthetic construct
  REGION 1..10: note = synthetic
QQSYSNPPIT

SEQ ID NO: 649 - DNA, 369 bp, synthetic construct
  misc_feature 1..369: note = synthetic
  source 1..369: mol_type = other DNA
gaagtgcagttggtggagtctgggggaggcttggtacagcctggcaggtccctgagactctcctgtgcagcctctggattcaagtttgctgattatgccatgcactgggtccggcaagctccagggaagggcctggagtgggtctcagagattagttggaatagtggtagcataggttatgtggactctgtgaagggccgattcaccatctccagagacaacgccaagaactccctgtatctgcaaatgaacagtctgagagctgaggacacggccttgtattactgtgtaaaagataaaagtggctacgggcactactatatcggtatggacgtctggggccaagggaccacggtcatcgtctcctcc

SEQ ID NO: 650 - protein, 123 aa, synthetic construct
  REGION 1..123: note = synthetic
EVQLVESGGGLVQPGRSLRLSCAASGFKFADYAMHWVRQAPGKGLEWVSEISWNSGSIGYVDSVKGRFTISRDNAKNSLYLQMNSLRAEDTALYYCVKDKSGYGHYYIGMDVWGQGTTVIVSS

SEQ ID NO: 651 - DNA, 24 bp, synthetic construct
  misc_feature 1..24: note = synthetic
  source 1..24: mol_type = other DNA
ggattcaagtttgctgattatgcc

SEQ ID NO: 652 - protein, 8 aa, synthetic construct
  REGION 1..8: note = synthetic
GFKFADYA

SEQ ID NO: 653 - DNA, 24 bp, synthetic construct
  misc_feature 1..24: note = synthetic
  source 1..24: mol_type = other DNA
attagttggaatagtggtagcata

SEQ ID NO: 654 - protein, 8 aa, synthetic construct
  REGION 1..8: note = synthetic
ISWNSGSI

SEQ ID NO: 655 - DNA, 48 bp, synthetic construct
  misc_feature 1..48: note = synthetic
  source 1..48: mol_type = other DNA
gtaaaagataaaagtggctacgggcactactatatcggtatggacgtc

SEQ ID NO: 656 - protein, 16 aa, synthetic construct
  REGION 1..16: note = synthetic
VKDKSGYGHYYIGMDV

SEQ ID NO: 657 - DNA, 324 bp, synthetic construct
  misc_feature 1..324: note = synthetic
  source 1..324: mol_type = other DNA
gacatccagatgacccagtctccatcctccctgtctgcatctgtaggagacagagtcaccatcacttgccgggcaagtcagagtattagcagctatttaaattggtatcagcagaaaccagggaaagcccctaagctcctgatctatgctgcatccagtttgcaaagtggggtcccatcaaggttcagtggcagtggatctgggacagatttcactctcaccatcagcagtctgcaacctgaagattttgcaacttactactgtcaacagagttacagtacccctccgatcaccttcggccaagggacacgactggagattaaa

SEQ ID NO: 658 - protein, 108 aa, synthetic construct; identical to SEQ ID NO: 610
  REGION 1..108: note = synthetic

SEQ ID NO: 659 - DNA, 18 bp, synthetic construct
  misc_feature 1..18: note = synthetic
  source 1..18: mol_type = other DNA
cagagtattagcagctat

SEQ ID NO: 660 - protein, 6 aa, synthetic construct
  REGION 1..6: note = synthetic
QSISSY

SEQ ID NO: 661-662 - skipped (2 entries)

SEQ ID NO: 663 - DNA, 30 bp, synthetic construct; identical to SEQ ID NO: 199
  misc_feature 1..30: note = synthetic
  source 1..30: mol_type = other DNA

SEQ ID NO: 664 - protein, 10 aa, synthetic construct
  REGION 1..10: note = synthetic
QQSYSTPPIT

SEQ ID NO: 665 - DNA, 372 bp, synthetic construct
  misc_feature 1..372: note = synthetic
  source 1..372: mol_type = other DNA
gaagtgcacctggtggagtctgggggaggcttggtacagcctggcaggtccctgagactctcctgtgcagcctctggattcacctttgatgattataccatgcactgggtccggcaagctccagggaagggcctggagtgggtctccgatattagttggaatagtggtagcataggctatgcggactctgtgaagggccgattcaccgtctccagagacaacgccaagaactccctgtatctgcaaatgaacagtctgagaggtgaggacacggccttgtattactgtgcaaaagatatgagtggctacggccactacggcaagtacggtatggacgtctggggccaagggaccacggtcaccgtctcctca

SEQ ID NO: 666 - protein, 124 aa, synthetic construct
  REGION 1..124: note = synthetic
EVHLVESGGGLVQPGRSLRLSCAASGFTFDDYTMHWVRQAPGKGLEWVSDISWNSGSIGYADSVKGRFTVSRDNAKNSLYLQMNSLRGEDTALYYCAKDMSGYGHYGKYGMDVWGQGTTVTVSS

SEQ ID NO: 667 - DNA, 24 bp, synthetic construct
  misc_feature 1..24: note = synthetic
  source 1..24: mol_type = other DNA
ggattcacctttgatgattatacc

SEQ ID NO: 668 - protein, 8 aa, synthetic construct
  REGION 1..8: note = synthetic
GFTFDDYT

SEQ ID NO: 669 - DNA, 24 bp, synthetic construct
  misc_feature 1..24: note = synthetic
  source 1..24: mol_type = other DNA
attagttggaatagtggtagcata

SEQ ID NO: 670 - protein, 8 aa, synthetic construct
  REGION 1..8: note = synthetic
ISWNSGSI

SEQ ID NO: 671 - DNA, 51 bp, synthetic construct
  misc_feature 1..51: note = synthetic
  source 1..51: mol_type = other DNA
gcaaaagatatgagtggctacggccactacggcaagtacggtatggacgtc

SEQ ID NO: 672 - protein, 17 aa, synthetic construct
  REGION 1..17: note = synthetic
AKDMSGYGHYGKYGMDV

SEQ ID NO: 673 - DNA, 324 bp, synthetic construct
  misc_feature 1..324: note = synthetic
  source 1..324: mol_type = other DNA
gacatccagatgacccagtctccatcctccctgtctgcatctgtaggagacagagtcaccatcacttgccgggcaagtcagagcattaggagctatttaaattggtatcagcagaaaccagggaaagtccctaagctcctgatctatgctgcatccagtttgcaaagtggggtcccatcaaggttcagtggcagtggatctgggacagatttcactctcaccatcaacagtctgcaacctgacgattttgcaacttactactgtcaacagacttacagtaaccctccgatcaccttcggccaagggacacgactggagattaaa

SEQ ID NO: 674 - protein, 108 aa, synthetic construct
  REGION 1..108: note = synthetic
DIQMTQSPSSLSASVGDRVTITCRASQSIRSYLNWYQQKPGKVPKLLIYAASSLQSGVPSRFSGSGSGTDFTLTINSLQPDDFATYYCQQTYSNPPITFGQGTRLEIK

SEQ ID NO: 675 - DNA, 18 bp, synthetic construct
  misc_feature 1..18: note = synthetic
  source 1..18: mol_type = other DNA
cagagcattaggagctat

SEQ ID NO: 676 - protein, 6 aa, synthetic construct
  REGION 1..6: note = synthetic
QSIRSY

SEQ ID NO: 677-678 - skipped (2 entries)

SEQ ID NO: 679 - DNA, 30 bp, synthetic construct
  misc_feature 1..30: note = synthetic
  source 1..30: mol_type = other DNA
caacagacttacagtaaccctccgatcacc

SEQ ID NO: 680 - protein, 10 aa, synthetic construct
  REGION 1..10: note = synthetic
QQTYSNPPIT

SEQ ID NO: 681 - DNA, 372 bp, synthetic construct
  misc_feature 1..372: note = synthetic
  source 1..372: mol_type = other DNA
gaggtgcagctggtggagtctgggggagacttggtacagcctggcaggtccctgagactctcctgtgcagcctctggattcacctttgatgattataccatgcactgggtccggcaagctccagggaagggcctggagtgggtctcaattattagttggaatggtaataccattgactatgcggactctgtgaagggccgattcaccatctccagagacaacgccaagaactccctgtatcttcaaatgaacagtctgagagctgaggacacggccttgtattactgtgcaaaagataagagtggctacggacacttctactattacgttttggacgtctggggccaagggaccacggtcaccgtctcctca

SEQ ID NO: 682 - protein, 124 aa, synthetic construct
  REGION 1..124: note = synthetic
EVQLVESGGDLVQPGRSLRLSCAASGFTFDDYTMHWVRQAPGKGLEWVSIISWNGNTIDYADSVKGRFTISRDNAKNSLYLQMNSLRAEDTALYYCAKDKSGYGHFYYYVLDVWGQGTTVTVSS

SEQ ID NO: 683 - DNA, 24 bp, synthetic construct
  misc_feature 1..24: note = synthetic
  source 1..24: mol_type = other DNA
ggattcacctttgatgattatacc

SEQ ID NO: 684 - protein, 8 aa, synthetic construct
  REGION 1..8: note = synthetic
GFTFDDYT

SEQ ID NO: 685 - DNA, 24 bp, synthetic construct
  misc_feature 1..24: note = synthetic
  source 1..24: mol_type = other DNA
attagttggaatggtaataccatt

SEQ ID NO: 686 - protein, 8 aa, synthetic construct
  REGION 1..8: note = synthetic
ISWNGNTI

SEQ ID NO: 687 - DNA, 51 bp, synthetic construct
  misc_feature 1..51: note = synthetic
  source 1..51: mol_type = other DNA
gcaaaagataagagtggctacggacacttctactattacgttttggacgtc

SEQ ID NO: 688 - protein, 17 aa, synthetic construct
  REGION 1..17: note = synthetic
AKDKSGYGHFYYYVLDV

SEQ ID NO: 689 - DNA, 321 bp, synthetic construct
  misc_feature 1..321: note = synthetic
  source 1..321: mol_type = other DNA
gacatccagatgacccagtctccatcctccctgtctgcatctgtaggagacagagtcaccatcacttgccgggcaagtcagagcattaacaactatttaaattggtatcagcagaaaccagggaaagcccctaaactcctgatctatgctgcttccagtttgcaaagtggggtcccgtcaaggttcagtggcagtggttctgggacagatttcactctcaccatcagcagtctgcaacctgaagattttgcaacttactactctcaacagagttacagtttcccgtggacgttcggccaagggaccaaggtggaaatcaaa

SEQ ID NO: 690 - protein, 107 aa, synthetic construct
  REGION 1..107: note = synthetic
DIQMTQSPSSLSASVGDRVTITCRASQSINNYLNWYQQKPGKAPKLLIYAASSLQSGVPSRFSGSGSGTDFTLTISSLQPEDFATYYSQQSYSFPWTFGQGTKVEIK

SEQ ID NO: 691 - DNA, 18 bp, synthetic construct
  misc_feature 1..18: note = synthetic
  source 1..18: mol_type = other DNA
cagagcattaacaactat

SEQ ID NO: 692 - protein, 6 aa, synthetic construct
  REGION 1..6: note = synthetic
QSINNY

SEQ ID NO: 693-694 - skipped (2 entries)

SEQ ID NO: 695 - DNA, 27 bp, synthetic construct
  misc_feature 1..27: note = synthetic
  source 1..27: mol_type = other DNA
caacagagttacagtttcccgtggacg

SEQ ID NO: 696 - protein, 9 aa, synthetic construct
  REGION 1..9: note = synthetic
QQSYSFPWT

SEQ ID NO: 697 - DNA, 363 bp, synthetic construct
  misc_feature 1..363: note = synthetic
  source 1..363: mol_type = other DNA
caggtgcagctggtggagtcggggggaggcgtggtccagcctgggaggtccctgagaccctcctgtgcagcgtctggatttagtttcagggactatggcatgcactgggtccgccaggctccaggtaagggactagagtggatggcacacatatggtataatggaaagaataaatattatgcagactccgtgaagggccgattcaccatctccagagacaattccaagaacacgctatatctgcaaatgaacagcctgagacccgaggacacggctgtatattattgtgcgagagatggtgtatcagcacgtggtactccatttgactactggggccagggaaccctggtcaccgtctcctca

SEQ ID NO: 698 - protein, 121 aa, synthetic construct
  REGION 1..121: note = synthetic
QVQLVESGGGVVQPGRSLRPSCAASGFSFRDYGMHWVRQAPGKGLEWMAHIWYNGKNKYYADSVKGRFTISRDNSKNTLYLQMNSLRPEDTAVYYCARDGVSARGTPFDYWGQGTLVTVSS

SEQ ID NO: 699 - DNA, 24 bp, synthetic construct
  misc_feature 1..24: note = synthetic
  source 1..24: mol_type = other DNA
ggatttagtttcagggactatggc

SEQ ID NO: 700 - protein, 8 aa, synthetic construct
  REGION 1..8: note = synthetic
GFSFRDYG

SEQ ID NO: 701 - DNA, 24 bp, synthetic construct
  misc_feature 1..24: note = synthetic
  source 1..24: mol_type = other DNA
atatggtataatggaaagaataaa

SEQ ID NO: 702 - protein, 8 aa, synthetic construct
  REGION 1..8: note = synthetic
IWYNGKNK

SEQ ID NO: 703 - DNA, 42 bp, synthetic construct
  misc_feature 1..42: note = synthetic
  source 1..42: mol_type = other DNA
gcgagagatggtgtatcagcacgtggtactccatttgactac

SEQ ID NO: 704 - protein, 14 aa, synthetic construct
  REGION 1..14: note = synthetic
ARDGVSARGTPFDY

SEQ ID NO: 705 - DNA, 321 bp, synthetic construct
  misc_feature 1..321: note = synthetic
  source 1..321: mol_type = other DNA
gaaacgacactcacgcagtctccagcattcatgtcagcggctccaggagacaaagtcagcatctcctgcattgccagccagtacattgatgatgatgtgaactggtaccaacagaaaccaggagaaactgctattttcattattcaagaagcttctactctcgttcctggaatctcacctcgattcagtggcagcgggtatggaacacattttaccctcacaattaataacatagattctgaggatgctgcattttacttctgtctccaacatgataatttcccgtacacttttggccaggggaccaagctggagatcaaa

SEQ ID NO: 706 - protein, 107 aa, synthetic construct
  REGION 1..107: note = synthetic
ETTLTQSPAFMSAAPGDKVSISCIASQYIDDDVNWYQQKPGETAIFIIQEASTLVPGISPRFSGSGYGTHFTLTINNIDSEDAAFYFCLQHDNFPYTFGQGTKLEIK

SEQ ID NO: 707 - DNA, 18 bp, synthetic construct
  misc_feature 1..18: note = synthetic
  source 1..18: mol_type = other DNA
cagtacattgatgatgat

SEQ ID NO: 708 - protein, 6 aa, synthetic construct
  REGION 1..6: note = synthetic
QYIDDD

SEQ ID NO: 709-710 - skipped (2 entries)

SEQ ID NO: 711 - DNA, 27 bp, synthetic construct
  misc_feature 1..27: note = synthetic
  source 1..27: mol_type = other DNA
ctccaacatgataatttcccgtacact

SEQ ID NO: 712 - protein, 9 aa, synthetic construct
  REGION 1..9: note = synthetic
LQHDNFPYT

SEQ ID NO: 713 - DNA, 384 bp, synthetic construct
  misc_feature 1..384: note = synthetic
  source 1..384: mol_type = other DNA
caggtgcagctggtggagtctgggggaggcttggtacagcctggggggtccctgagactctcctgtgcagcctcttatttcacctttagcagttttgccatgaactgggtccgccaggctccagggcagggcctggagtgggtctcagctattagtggtagggtctcagctattagtggtagtggtggtatcacatactacgcagactccgtgaagggccggttcatcatctccagagacaattccaagaacacgctgtatctgcaaatgagcggcctgagagccgaggacacggccgtatattactgtgcgaaaggcccctatttgactacagtcaccccctttgactactggggccagggaaccctggtcaccgtctcctca

SEQ ID NO: 714 - protein, 128 aa, synthetic construct
  REGION 1..128: note = synthetic
QVQLVESGGGLVQPGGSLRLSCAASYFTFSSFAMNWVRQAPGQGLEWVSAISGRVSAISGSGGITYYADSVKGRFIISRDNSKNTLYLQMSGLRAEDTAVYYCAKGPYLTTVTPFDYWGQGTLVTVSS

SEQ ID NO: 715 - DNA, 24 bp, synthetic construct
  misc_feature 1..24: note = synthetic
  source 1..24: mol_type = other DNA
tatttcacctttagcagttttgcc

SEQ ID NO: 716 - protein, 8 aa, synthetic construct
  REGION 1..8: note = synthetic
YFTFSSFA

SEQ ID NO: 717 - DNA, 24 bp, synthetic construct
  misc_feature 1..24: note = synthetic
  source 1..24: mol_type = other DNA
attagtggtagtggtggtatcaca

SEQ ID NO: 718 - protein, 8 aa, synthetic construct
  REGION 1..8: note = synthetic
ISGSGGIT

SEQ ID NO: 719 - DNA, 42 bp, synthetic construct
  misc_feature 1..42: note = synthetic
  source 1..42: mol_type = other DNA
gcgaaaggcccctatttgactacagtcaccccctttgactac

SEQ ID NO: 720 - protein, 14 aa, synthetic construct
  REGION 1..14: note = synthetic
AKGPYLTTVTPFDY

SEQ ID NO: 721 - DNA, 324 bp, synthetic construct
  misc_feature 1..324: note = synthetic
  source 1..324: mol_type = other DNA
gacatccagttgacccagtctccatcttccgtgtctgcatctgtcggagacagagtcaccatcacttgtcgggcgagtcaggggattagcagctggttagcctggtatcagcagaaaccagggaaagcccctaaactcctgatctatgctgtatccagtttgcaaaatggggtcccatcaaggttcagcggcagtggatctgggacagatttcaccctcaccatcagcagcctgcagcctgaagactttgcaacttactattgtcaacaggctaacagtttcccattcactttcggccctgggaccaagctggagatcaaacga

SEQ ID NO: 722 - protein, 108 aa, synthetic construct
  REGION 1..108: note = synthetic
DIQLTQSPSSVSASVGDRVTITCRASQGISSWLAWYQQKPGKAPKLLIYAVSSLQNGVPSRFSGSGSGTDFTLTISSLQPEDFATYYCQQANSFPFTFGPGTKLEIKR

SEQ ID NO: 723 - DNA, 18 bp, synthetic construct
  misc_feature 1..18: note = synthetic
  source 1..18: mol_type = other DNA
caggggattagcagctgg

SEQ ID NO: 724 - protein, 6 aa, synthetic construct
  REGION 1..6: note = synthetic
QGISSW

SEQ ID NO: 725-726 - skipped (2 entries)

SEQ ID NO: 727 - DNA, 27 bp, synthetic construct
  misc_feature 1..27: note = synthetic
  source 1..27: mol_type = other DNA
caacaggctaacagtttcccattcact

SEQ ID NO: 728 - protein, 9 aa, synthetic construct
  REGION 1..9: note = synthetic
QQANSFPFT

SEQ ID NO: 729 - DNA, 369 bp, synthetic construct
  misc_feature 1..369: note = synthetic
  source 1..369: mol_type = other DNA
gaggtgcagctggtggagtctgggggaggcttggtacagcctggcaggtccctgagactctcctgtgcagcctctggattcacctttgctgattatgccatgcactgggtccggcaagctccagggaagggcctggagtgggtctcaggtattagttggaatagtggtagtataggttatgcggactctgtgaagggccgattcaccatctccagagacaacgccaagaactccctgtatctgcaaatgaacagtctgagagctgaggacacggccttatattactgtgtaaaagataatagtggctacgcatcctactactacggtatggacgtctggggccaagggaccacggtcaccgtctcctca

SEQ ID NO: 730 - protein, 123 aa, synthetic construct
  REGION 1..123: note = synthetic
EVQLVESGGGLVQPGRSLRLSCAASGFTFADYAMHWVRQAPGKGLEWVSGISWNSGSIGYADSVKGRFTISRDNAKNSLYLQMNSLRAEDTALYYCVKDNSGYASYYYGMDVWGQGTTVTVSS

SEQ ID NO: 731 - DNA, 24 bp, synthetic construct
  misc_feature 1..24: note = synthetic
  source 1..24: mol_type = other DNA
ggattcacctttgctgattatgcc

SEQ ID NO: 732 - protein, 8 aa, synthetic construct
  REGION 1..8: note = synthetic
GFTFADYA

SEQ ID NO: 733 - DNA, 24 bp, synthetic construct
  misc_feature 1..24: note = synthetic
  source 1..24: mol_type = other DNA
attagttggaatagtggtagtata

SEQ ID NO: 734 - protein, 8 aa, synthetic construct
  REGION 1..8: note = synthetic
ISWNSGSI

SEQ ID NO: 735 - DNA, 48 bp, synthetic construct
  misc_feature 1..48: note = synthetic
  source 1..48: mol_type = other DNA
gtaaaagataatagtggctacgcatcctactactacggtatggacgtc

SEQ ID NO: 736 - protein, 16 aa, synthetic construct
  REGION 1..16: note = synthetic
VKDNSGYASYYYGMDV

SEQ ID NO: 737 - DNA, 324 bp, synthetic construct
  misc_feature 1..324: note = synthetic
  source 1..324: mol_type = other DNA
gacatccagttgacccagtccccatcctccctgtctgcatctgtaggagacagagtcaccatcacttgccgggcaagtcagagcattagcagctatttaaattggtatcagcagaaaccagggaaagcccctaagctcctgatctacgatgcatccaatttggaaacaggggtcccatcaaggttcagtggaagtggatctgggacagattttactttcaccatcagcagcctgcagcctgaagatattgcaacatattactgtcaacagtatgataatctcccattcactttcggccctgggaccaaagtggatatcaaacga

SEQ ID NO: 738 - protein, 108 aa, synthetic construct
  REGION 1..108: note = synthetic
DIQLTQSPSSLSASVGDRVTITCRASQSISSYLNWYQQKPGKAPKLLIYDASNLETGVPSRFSGSGSGTDFTFTISSLQPEDIATYYCQQYDNLPFTFGPGTKVDIKR

SEQ ID NO: 739 - DNA, 18 bp, synthetic construct
  misc_feature 1..18: note = synthetic
  source 1..18: mol_type = other DNA
cagagcattagcagctat

SEQ ID NO: 740 - protein, 6 aa, synthetic construct
  REGION 1..6: note = synthetic
QSISSY

SEQ ID NO: 741-742 - skipped (2 entries)

SEQ ID NO: 743 - DNA, 27 bp, synthetic construct
  misc_feature 1..27: note = synthetic
  source 1..27: mol_type = other DNA
caacagtatgataatctcccattcact

SEQ ID NO: 744 - protein, 9 aa, synthetic construct
  REGION 1..9: note = synthetic
QQYDNLPFT

SEQ ID NO: 745 - DNA, 378 bp, synthetic construct
  misc_feature 1..378: note = synthetic
  source 1..378: mol_type = other DNA
gaggtgcagctggtggagtctgggggaggcgtggtccagcctgggaggtccctgagactctcctgtgcagcctctggattcaccttcagtaactatggcatgcactgggtccgccaggctccaggcaaagggctggagtgggtgacagttatattacatgatggaagttataaatactatgcagactccgtgaagggccgattcaccatctccagagacaattccaagaacacgctacatctgcaaatgaacagcctgagaactgaggacacggctgtatattactgtgcgaaagggcctatgtttcggggagtcccttacaaccactactatggtatggacgtctggggccaagggaccacggtcaccgtctcctca

SEQ ID NO: 746 - protein, 126 aa, synthetic construct
  REGION 1..126: note = synthetic
EVQLVESGGGVVQPGRSLRLSCAASGFTFSNYGMHWVRQAPGKGLEWVTVILHDGSYKYYADSVKGRFTISRDNSKNTLHLQMNSLRTEDTAVYYCAKGPMFRGVPYNHYYGMDVWGQGTTVTVSS

SEQ ID NO: 747 - DNA, 24 bp, synthetic construct
  misc_feature 1..24: note = synthetic
  source 1..24: mol_type = other DNA
ggattcaccttcagtaactatggc

SEQ ID NO: 748 - protein, 8 aa, synthetic construct
  REGION 1..8: note = synthetic
GFTFSNYG

SEQ ID NO: 749 - DNA, 24 bp, synthetic construct
  misc_feature 1..24: note = synthetic
  source 1..24: mol_type = other DNA
atattacatgatggaagttataaa

SEQ ID NO: 750 - protein, 8 aa, synthetic construct
  REGION 1..8: note = synthetic
ILHDGSYK

SEQ ID NO: 751 - DNA, 57 bp, synthetic construct
  misc_feature 1..57: note = synthetic
  source 1..57: mol_type = other DNA
gcgaaagggcctatgtttcggggagtcccttacaaccactactatggtatggacgtc

SEQ ID NO: 752 - protein, 19 aa, synthetic construct
  REGION 1..19: note = synthetic
AKGPMFRGVPYNHYYGMDV

SEQ ID NO: 753 - DNA, 324 bp, synthetic construct
  misc_feature 1..324: note = synthetic
  source 1..324: mol_type = other DNA
gacatccagatgacccagtctccatcctccctgtctgcatctgtaggagacagagtcaccatcacttgccgggcaagtcagggcatcagaaatgatttaggctggtatcagcagaaaccagggaaagcccctaagcgcctgatctatgctgcatccagtttgcaaagtggggtctcatcaaggttcagcggcagtggatctgggacagaattcactctcacaatcagcagcctgcagcctgaagattttgcaacttattactgtctacagcataatagttacccgtacacttttggccaggggaccaaggtggaaatcaaacga

SEQ ID NO: 754 - protein, 108 aa, synthetic construct
  REGION 1..108: note = synthetic
DIQMTQSPSSLSASVGDRVTITCRASQGIRNDLGWYQQKPGKAPKRLIYAASSLQSGVSSRFSGSGSGTEFTLTISSLQPEDFATYYCLQHNSYPYTFGQGTKVEIKR

SEQ ID NO: 755 - DNA, 18 bp, synthetic construct
  misc_feature 1..18: note = synthetic
  source 1..18: mol_type = other DNA
cagggcatcagaaatgat

SEQ ID NO: 756 - protein, 6 aa, synthetic construct
  REGION 1..6: note = synthetic
QGIRND

SEQ ID NO: 757-758 - skipped (2 entries)

SEQ ID NO: 759 - DNA, 27 bp, synthetic construct
  misc_feature 1..27: note = synthetic
  source 1..27: mol_type = other DNA
ctacagcataatagttacccgtacact

SEQ ID NO: 760 - protein, 9 aa, synthetic construct
  REGION 1..9: note = synthetic
LQHNSYPYT

SEQ ID NO: 761 - DNA, 357 bp, synthetic construct
  misc_feature 1..357: note = synthetic
  source 1..357: mol_type = other DNA
gaggtgcagctggtggagtctgggggaggcgtggtccagcctgggaggtccctgagactctcctgtacagcgtcaggtttccccttcagtcgctatggcatgcactgggtccgccaggctccaggcaaggggctggaatgggtgacatttatatggtatgatggaagtaataaatactatgcagactccgcgaagggccgattcaccatcaccagagacaattccaagaacacggtgtatctgcaaatggacagcctgagagccgatgacacggctgtttattattgtgtgagagatcaggcagctctctactattttgactcttggggccagggaaccctggtcaccgtctcctca

SEQ ID NO: 762 - protein, 119 aa, synthetic construct
  REGION 1..119: note = synthetic
EVQLVESGGGVVQPGRSLRLSCTASGFPFSRYGMHWVRQAPGKGLEWVTFIWYDGSNKYYADSAKGRFTITRDNSKNTVYLQMDSLRADDTAVYYCVRDQAALYYFDSWGQGTLVTVSS

SEQ ID NO: 763 - DNA, 24 bp, synthetic construct
  misc_feature 1..24: note = synthetic
  source 1..24: mol_type = other DNA
ggtttccccttcagtcgctatggc

SEQ ID NO: 764 - protein, 8 aa, synthetic construct
  REGION 1..8: note = synthetic
GFPFSRYG

SEQ ID NO: 765 - DNA, 24 bp, synthetic construct
  misc_feature 1..24: note = synthetic
  source 1..24: mol_type = other DNA
atatggtatgatggaagtaataaa

SEQ ID NO: 766 - protein, 8 aa, synthetic construct
  REGION 1..8: note = synthetic
IWYDGSNK

SEQ ID NO: 767 - DNA, 36 bp, synthetic construct
  misc_feature 1..36: note = synthetic
  source 1..36: mol_type = other DNA
gtgagagatcaggcagctctctactattttgactct

SEQ ID NO: 768 - protein, 12 aa, synthetic construct
  REGION 1..12: note = synthetic
VRDQAALYYFDS

SEQ ID NO: 769 - DNA, 324 bp, synthetic construct
  misc_feature 1..324: note = synthetic
  source 1..324: mol_type = other DNA
gacatccagatgacccagtctccatcttccgtgtctgcatctgtaggagacagagtcaccatcacttgtcgggcgagtcagggtattagcaggtggttagcctggtatcagcagaaaccagggaaagcccctaagctcctgatctctgctgcatccagtttgcaaagtggagtcccatcaaggttcagcggcagtggatctgggacagatttcactctcaccatcagcggcctgcagcctgaagattttgcaacttactattgtcaaaaggctaacagtttccctttcactttcggccctgggaccaagctggagatcaaacga

SEQ ID NO: 770 - protein, 108 aa, synthetic construct
  REGION 1..108: note = synthetic
DIQMTQSPSSVSASVGDRVTITCRASQGISRWLAWYQQKPGKAPKLLISAASSLQSGVPSRFSGSGSGTDFTLTISGLQPEDFATYYCQKANSFPFTFGPGTKLEIKR

SEQ ID NO: 771 - DNA, 18 bp, synthetic construct
  misc_feature 1..18: note = synthetic
  source 1..18: mol_type = other DNA
cagggtattagcaggtgg

SEQ ID NO: 772 - protein, 6 aa, synthetic construct
  REGION 1..6: note = synthetic
QGISRW

SEQ ID NO: 773-774 - skipped (2 entries)

SEQ ID NO: 775 - DNA, 27 bp, synthetic construct
  misc_feature 1..27: note = synthetic
  source 1..27: mol_type = other DNA
caaaaggctaacagtttccctttcact

SEQ ID NO: 776 - protein, 9 aa, synthetic construct
  REGION 1..9: note = synthetic
QKANSFPFT

SEQ ID NO: 777 - DNA, 378 bp, synthetic construct
  misc_feature 1..378: note = synthetic
  source 1..378: mol_type = other DNA
gaggtgcagctggtggagtctgggggaggcgtggtccagcctgggaggtccctgagactctcctgtgcagcctctggattcaccttcagtagttatggcatgcactgggtccgccaggctccaggcaaggggctggagtgggtgacagttatattacatgatggaagtaatagatactctgcagactccgtgaagggccgattcaccatctccagagacaattccaagaacacgctttatctgcaaatgaacatcctgagagttgaggacacggctgtgtattactgtacgaaaggggctatggttcggggagtcccttacaatcactactacggcatggacgtctggggccaagggaccacggtcaccgtctcctca

SEQ ID NO: 778 - protein, 126 aa, synthetic construct
  REGION 1..126: note = synthetic
EVQLVESGGGVVQPGRSLRLSCAASGFTFSSYGMHWVRQAPGKGLEWVTVILHDGSNRYSADSVKGRFTISRDNSKNTLYLQMNILRVEDTAVYYCTKGAMVRGVPYNHYYGMDVWGQGTTVTVSS

SEQ ID NO: 779 - DNA, 24 bp, synthetic construct
  misc_feature 1..24: note = synthetic
  source 1..24: mol_type = other DNA
ggattcaccttcagtagttatggc

SEQ ID NO: 780 - protein, 8 aa, synthetic construct
  REGION 1..8: note = synthetic
GFTFSSYG

SEQ ID NO: 781 - DNA, 24 bp, synthetic construct
  misc_feature 1..24: note = synthetic
  source 1..24: mol_type = other DNA
atattacatgatggaagtaataga

SEQ ID NO: 782 - protein, 8 aa, synthetic construct
  REGION 1..8: note = synthetic
ILHDGSNR

SEQ ID NO: 783 - DNA, 57 bp, synthetic construct
  misc_feature 1..57: note = synthetic
  source 1..57: mol_type = other DNA
acgaaaggggctatggttcggggagtcccttacaatcactactacggcatggacgtc

SEQ ID NO: 784 - protein, 19 aa, synthetic construct
  REGION 1..19: note = synthetic
TKGAMVRGVPYNHYYGMDV

SEQ ID NO: 785 - DNA, 324 bp, synthetic construct
  misc_feature 1..324: note = synthetic
  source 1..324: mol_type = other DNA
gacatccagatgacccagtctccatcctccctgtctgcatctgtaggagacagagtcaccatcacttgccgggcaagtcagggcattagaaatgatttaggctggtatcagcagaaaccagggaaagcccctaagcgcctaatctatgctgcatccattttgcaaagtggggtcccatcaaggttcagcggcagtggatctgggacagaattcactctcacaatcagcagcctgcagcctgaagattttgcaacttattactgtctacagcataatagttacccgtacacttttggccaggggaccaagctggagatcaaacga

SEQ ID NO: 786 - protein, 108 aa, synthetic construct
  REGION 1..108: note = synthetic
DIQMTQSPSSLSASVGDRVTITCRASQGIRNDLGWYQQKPGKAPKRLIYAASILQSGVPSRFSGSGSGTEFTLTISSLQPEDFATYYCLQHNSYPYTFGQGTKLEIKR

SEQ ID NO: 787 - DNA, 18 bp, synthetic construct
  misc_feature 1..18: note = synthetic
  source 1..18: mol_type = other DNA
cagggcattagaaatgat

SEQ ID NO: 788 - protein, 6 aa, synthetic construct
  REGION 1..6: note = synthetic
QGIRND

SEQ ID NO: 789-790 - skipped (2 entries)

SEQ ID NO: 791 - DNA, 27 bp, synthetic construct
  misc_feature 1..27: note = synthetic
  source 1..27: mol_type = other DNA
ctacagcataatagttacccgtacact

SEQ ID NO: 792 - protein, 9 aa, synthetic construct
  REGION 1..9: note = synthetic
LQHNSYPYT

SEQ ID NO: 793 - DNA, 378 bp, synthetic construct
  misc_feature 1..378: note = synthetic
  source 1..378: mol_type = other DNA
gaggtgcagctggtggagtctgggggaggcgtggtccagcctgggaggtccctgagactctcctgtgcagcctctggattcaccttcagtagctatggcatgcactgggtccgccaggctccaggcaaggggctggagtgggtgacagttatattacatgatggaagtaatagatactatgcagactccgtgaagggccgattcaccatctccagagacaattccaagaacacgctttatctgcaaatgaacatcctgagagctgaggacacggctgtgtattactgtacgaaaggggctatggttcggggagtcccttacaatcactactacggcatggacgtctggggccaagggaccacggtcaccgtctcctca

SEQ ID NO: 794 - protein, 126 aa, synthetic construct
  REGION 1..126: note = synthetic
EVQLVESGGGVVQPGRSLRLSCAASGFTFSSYGMHWVRQAPGKGLEWVTVILHDGSNRYYADSVKGRFTISRDNSKNTLYLQMNILRAEDTAVYYCTKGAMVRGVPYNHYYGMDVWGQGTTVTVSS

SEQ ID NO: 795 - DNA, 24 bp, synthetic construct
  misc_feature 1..24: note = synthetic
  source 1..24: mol_type = other DNA
ggattcaccttcagtagctatggc

SEQ ID NO: 796 - protein, 8 aa, synthetic construct
  REGION 1..8: note = synthetic
GFTFSSYG

SEQ ID NO: 797 - DNA, 24 bp, synthetic construct
  misc_feature 1..24: note = synthetic
  source 1..24: mol_type = other DNA
atattacatgatggaagtaataga

SEQ ID NO: 798 - protein, 8 aa, synthetic construct
  REGION 1..8: note = synthetic
ILHDGSNR

SEQ ID NO: 799 - DNA, 57 bp, synthetic construct; identical to SEQ ID NO: 783
  misc_feature 1..57: note = synthetic
  source 1..57: mol_type = other DNA

SEQ ID NO: 800 - protein, 19 aa, synthetic construct
  REGION 1..19: note = synthetic
TKGAMVRGVPYNHYYGMDV

SEQ ID NO: 801 - DNA, 324 bp, synthetic construct
  misc_feature 1..324: note = synthetic
  source 1..324: mol_type = other DNA
gacatcgtgatgacccagtctccatcctccctgtctgcatctgtaggagacagagtcaccatcacttgccgggcaagtcagggcattagaaatgatttaggctggtatcagcagaaaccagggaaagcccctaagcgcctgatctatgctgcatccaatttgcaaagtggggtcccatcaaggttcagcggcagtggatctgggacagaattcactctcacaatcagcagcctgcagcctgaagattttgcaacttattactgtctacagcataatagttacccgtacacttttggccaggggaccaagctggagatcaaacga

SEQ ID NO: 802 - protein, 108 aa, synthetic construct
  REGION 1..108: note = synthetic
DIVMTQSPSSLSASVGDRVTITCRASQGIRNDLGWYQQKPGKAPKRLIYAASNLQSGVPSRFSGSGSGTEFTLTISSLQPEDFATYYCLQHNSYPYTFGQGTKLEIKR

SEQ ID NO: 803 - DNA, 18 bp, synthetic construct
  misc_feature 1..18: note = synthetic
  source 1..18: mol_type = other DNA
cagggcattagaaatgat

SEQ ID NO: 804 - protein, 6 aa, synthetic construct
  REGION 1..6: note = synthetic
QGIRND

SEQ ID NO: 805-806 - skipped (2 entries)

SEQ ID NO: 807 - DNA, 27 bp, synthetic construct
  misc_feature 1..27: note = synthetic
  source 1..27: mol_type = other DNA
ctacagcataatagttacccgtacact

SEQ ID NO: 808 - protein, 9 aa, synthetic construct
  REGION 1..9: note = synthetic
LQHNSYPYT

SEQ ID NO: 809 - DNA, 378 bp, synthetic construct
  misc_feature 1..378: note = synthetic
  source 1..378: mol_type = other DNA
caggtgcagctggtggagtctgggggaggcgtggtccagcctgggaggtccctgagactctcctgtgcagcctctggattcaccttcagtagctatggcatgcactgggtccgccaggctccaggcaaggggctggagtgggtggcagttatatcatatgatggaagtaataaatactatgcagactccgtgaagggccgattcaccatctccagagactattccaagaacacgctgtatctgcaaatgaacagcctgagagctgaggacacggctgtgttttactgtgcgaaaggggctatggttcggggagtcccttacaactactactacggtatggacgtctggggccaagggaccacggtcaccgtctcctca

SEQ ID NO: 810 - protein, 126 aa, synthetic construct
  REGION 1..126: note = synthetic
QVQLVESGGGVVQPGRSLRLSCAASGFTFSSYGMHWVRQAPGKGLEWVAVISYDGSNKYYADSVKGRFTISRDYSKNTLYLQMNSLRAEDTAVFYCAKGAMVRGVPYNYYYGMDVWGQGTTVTVSS

SEQ ID NO: 811 - DNA, 24 bp, synthetic construct
  misc_feature 1..24: note = synthetic
  source 1..24: mol_type = other DNA
ggattcaccttcagtagctatggc

SEQ ID NO: 812 - protein, 8 aa, synthetic construct
  REGION 1..8: note = synthetic
GFTFSSYG

SEQ ID NO: 813 - DNA, 24 bp, synthetic construct
  misc_feature 1..24: note = synthetic
  source 1..24: mol_type = other DNA
atatcatatgatggaagtaataaa

SEQ ID NO: 814 - protein, 8 aa, synthetic construct
  REGION 1..8: note = synthetic
ISYDGSNK

SEQ ID NO: 815 - DNA, 57 bp, synthetic construct
  misc_feature 1..57: note = synthetic
  source 1..57: mol_type = other DNA
gcgaaaggggctatggttcggggagtcccttacaactactactacggtatggacgtc

SEQ ID NO: 816 - protein, 19 aa, synthetic construct
  REGION 1..19: note = synthetic
AKGAMVRGVPYNYYYGMDV

SEQ ID NO: 817 - DNA, 321 bp, synthetic construct
  misc_feature 1..321: note = synthetic
  source 1..321: mol_type = other DNA
gacatccagatgacccagtctccatcctccctgtctgcatctgtaggagacagagtcaccatcacttgccgggcaagtcagggcattagaaatgatttaggctggtttcagcagaaaccagggaaagcccctaagcgcctgatctatgctgcatccagtttgcaaagtggggtcccatcaaggttcagcggcagtggatctgggacagaattcactctcacaatcagcagcctgcagcctgaagattttgcaacttattactgtctacagcataatagttacccgtacacttttggccaggggaccaagctggagatcaaa

SEQ ID NO: 818 - protein, 107 aa, synthetic construct
  REGION 1..107: note = synthetic
DIQMTQSPSSLSASVGDRVTITCRASQGIRNDLGWFQQKPGKAPKRLIYAASSLQSGVPSRFSGSGSGTEFTLTISSLQPEDFATYYCLQHNSYPYTFGQGTKLEIK

SEQ ID NO: 819 - DNA, 18 bp, synthetic construct
  misc_feature 1..18: note = synthetic
  source 1..18: mol_type = other DNA
cagggcattagaaatgat

SEQ ID NO: 820 - protein, 6 aa, synthetic construct
  REGION 1..6: note = synthetic
QGIRND

SEQ ID NO: 821-822 - skipped (2 entries)

SEQ ID NO: 823 - DNA, 27 bp, synthetic construct
  misc_feature 1..27: note = synthetic
  source 1..27: mol_type = other DNA
ctacagcataatagttacccgtacact

SEQ ID NO: 824 - protein, 9 aa, synthetic construct
  REGION 1..9: note = synthetic
LQHNSYPYT

SEQ ID NO: 825 - DNA, 378 bp, synthetic construct
  misc_feature 1..378: note = synthetic
  source 1..378: mol_type = other DNA
caggtgcagctggtggagtctgggggaggcgtggtccagcctgggaggtccctgagactctcctgtgcagcctctggactcaccttcagtagctatggcatgcactgggtccgccaggctccaggcaaggggctggagtgggtggcagttatatcatatgatggaagtaataaatactatacagactccgtgaagggccgattcaccatctccagagacaattctaagaacacgctgtatctgcaaatgaacagcctgagagctgaggacacggctgtgtattactgtgcgaaaggggccatggttcggggagtcccttacaactactactacggtatggacgtctggggccaagggaccacggtcaccgtctcctca

SEQ ID NO: 826 - protein, 126 aa, synthetic construct
  REGION 1..126: note = synthetic
QVQLVESGGGVVQPGRSLRLSCAASGLTFSSYGMHWVRQAPGKGLEWVAVISYDGSNKYYTDSVKGRFTISRDNSKNTLYLQMNSLRAEDTAVYYCAKGAMVRGVPYNYYYGMDVWGQGTTVTVSS

SEQ ID NO: 827 - DNA, 24 bp, synthetic construct
  misc_feature 1..24: note = synthetic
  source 1..24: mol_type = other DNA
ggactcaccttcagtagctatggc

SEQ ID NO: 828 - protein, 8 aa, synthetic construct
  REGION 1..8: note = synthetic
GLTFSSYG

SEQ ID NO: 829 - DNA, 24 bp, synthetic construct
  misc_feature 1..24: note = synthetic
  source 1..24: mol_type = other DNA
atatcatatgatggaagtaataaa

SEQ ID NO: 830 - protein, 8 aa, synthetic construct
  REGION 1..8: note = synthetic
ISYDGSNK

SEQ ID NO: 831 - DNA, 57 bp, synthetic construct
  misc_feature 1..57: note = synthetic
  source 1..57: mol_type = other DNA
gcgaaaggggccatggttcggggagtcccttacaactactactacggtatggacgtc

SEQ ID NO: 832 - protein, 19 aa, synthetic construct
  REGION 1..19: note = synthetic
AKGAMVRGVPYNYYYGMDV

SEQ ID NO: 833 - DNA, 321 bp, synthetic construct
  misc_feature 1..321: note = synthetic
  source 1..321: mol_type = other DNA
gacatccagatgacccagtctccatcctccctgtctgcatctgtaggagacagagtcaccatcacttgccgggcaagtcagggcattagaaatgatttaggctggtatcagcagaaaccagggaaagcccctaagcgcctgatctatgctgcgtccagtttgcaaagtggggtcccatcaaggttcagcggcagtggatctgggacagaattcactctcacaatcagcagcctgcagcctgaagattttgcaacttattactgtctacagcataatagttacccgtacacttttggccaggggaccaagctggagatcaaa

SEQ ID NO: 834 - protein, 107 aa, synthetic construct
  REGION 1..107: note = synthetic
DIQMTQSPSSLSASVGDRVTITCRASQGIRNDLGWYQQKPGKAPKRLIYAASSLQSGVPSRFSGSGSGTEFTLTISSLQPEDFATYYCLQHNSYPYTFGQGTKLEIK

SEQ ID NO: 835 - DNA, 18 bp, synthetic construct
  misc_feature 1..18: note = synthetic
  source 1..18: mol_type = other DNA
cagggcattagaaatgat

SEQ ID NO: 836 - protein, 6 aa, synthetic construct
  REGION 1..6: note = synthetic
QGIRND

SEQ ID NO: 837-838 - skipped (2 entries)

SEQ ID NO: 839 - DNA, 27 bp, synthetic construct
  misc_feature 1..27: note = synthetic
  source 1..27: mol_type = other DNA
ctacagcataatagttacccgtacact

SEQ ID NO: 840 - protein, 9 aa, synthetic construct
  REGION 1..9: note = synthetic
LQHNSYPYT

SEQ ID NO: 841 - DNA, 378 bp, synthetic construct
  misc_feature 1..378: note = synthetic
  source 1..378: mol_type = other DNA
caggtgcagctggtggagtctgggggaggcgtggtccagcctgggaggtccctgagactctcctgtgcagcctctggattcaccttcaggagctttggcatgcactgggtccgccaggctccaggcaaggggctggagtgggtggcagttatttcatatgatggaaattataaatactatgcagactccgtgaagggccgattcaccatctccagagacaattccaagaacacgctgtatctgcaaatgaacagcctgagagctgaggacacggctgtacattactgtgcgaaaggggctatggttcggggagtcccttacaacttctactacggtatggacgtctggggccaagggaccacggtcaccgtctcctca

SEQ ID NO: 842 - protein, 126 aa, synthetic construct
  REGION 1..126: note = synthetic
QVQLVESGGGVVQPGRSLRLSCAASGFTFRSFGMHWVRQAPGKGLEWVAVISYDGNYKYYADSVKGRFTISRDNSKNTLYLQMNSLRAEDTAVHYCAKGAMVRGVPYNFYYGMDVWGQGTTVTVSS

SEQ ID NO: 843 - DNA, 24 bp, synthetic construct
  misc_feature 1..24: note = synthetic
  source 1..24: mol_type = other DNA
ggattcaccttcaggagctttggc

SEQ ID NO: 844 - protein, 8 aa, synthetic construct
  REGION 1..8: note = synthetic
GFTFRSFG

SEQ ID NO: 845 - DNA, 24 bp, synthetic construct
  misc_feature 1..24: note = synthetic
  source 1..24: mol_type = other DNA
atttcatatgatggaaattataaa

SEQ ID NO: 846 - protein, 8 aa, synthetic construct
  REGION 1..8: note = synthetic
ISYDGNYK

SEQ ID NO: 847 - DNA, 57 bp, synthetic construct
  misc_feature 1..57: note = synthetic
  source 1..57: mol_type = other DNA
gcgaaaggggctatggttcggggagtcccttacaacttctactacggtatggacgtc

SEQ ID NO: 848 - protein, 19 aa, synthetic construct
  REGION 1..19: note = synthetic
AKGAMVRGVPYNFYYGMDV

SEQ ID NO: 849 - DNA, 321 bp, synthetic construct
  misc_feature 1..321: note = synthetic
  source 1..321: mol_type = other DNA
gacatccagatgacccagtctccatcctccctgtctgcatctgtaggagacagagtcaccatcacttgccgggcaagtcaggtcattagaaatgatttaggctggtatcagcagaaaccagggaaagcccctaagcgcctgatctatgctgcatccagtttgcaaagtgggatcccatcaaggttcagcggcagtggatctgggacagaattcactctcacaatcagcagcctgcagcctgaagattttgcaacttattactgtctacagcataatagttacccgtacacttttggccaggggaccaagctggagatcaaa

SEQ ID NO: 850 - protein, 107 aa, synthetic construct
  REGION 1..107: note = synthetic
DIQMTQSPSSLSASVGDRVTITCRASQVIRNDLGWYQQKPGKAPKRLIYAASSLQSGIPSRFSGSGSGTEFTLTISSLQPEDFATYYCLQHNSYPYTFGQGTKLEIK

SEQ ID NO: 851 - DNA, 18 bp, synthetic construct
  misc_feature 1..18: note = synthetic
  source 1..18: mol_type = other DNA
caggtcattagaaatgat

SEQ ID NO: 852 - protein, 6 aa, synthetic construct
  REGION 1..6: note = synthetic
QVIRND

SEQ ID NO: 853-854 - skipped (2 entries)

SEQ ID NO: 855 - DNA, 27 bp, synthetic construct
  misc_feature 1..27: note = synthetic
  source 1..27: mol_type = other DNA
ctacagcataatagttacccgtacact

SEQ ID NO: 856 - protein, 9 aa, synthetic construct
  REGION 1..9: note = synthetic
LQHNSYPYT

SEQ ID NO: 857 - DNA, 369 bp, synthetic construct
  misc_feature 1..369: note = synthetic
  source 1..369: mol_type = other DNA
gaggtgcagctggtggagtctgggggaggcttggtacagcctggcaggtccctgagactctcctgtgcagcctctggattcacctttgatgattataccatgcactgggtccggcaagttccaggaaagggcctggagtggatctcaggtattagttggaatagtggtagcatggactatgcggactctgtgaagggccgattcaccatctctagagacaacgccaggaactccctgtttctgcaaatgaacagtgtgagaactgaggacacggccttgtattactgtgcaaaagataagagtggctacggctccttctactacggtatggacgtctggggccaggggaccacggtcaccgtctcctca

SEQ ID NO: 858 - protein, 123 aa, synthetic construct
  REGION 1..123: note = synthetic
EVQLVESGGGLVQPGRSLRLSCAASGFTFDDYTMHWVRQVPGKGLEWISGISWNSGSMDYADSVKGRFTISRDNARNSLFLQMNSVRTEDTALYYCAKDKSGYGSFYYGMDVWGQGTTVTVSS

SEQ ID NO: 859 - DNA, 24 bp, synthetic construct
  misc_feature 1..24: note = synthetic
  source 1..24: mol_type = other DNA
ggattcacctttgatgattatacc

SEQ ID NO: 860 - protein, 8 aa, synthetic construct
  REGION 1..8: note = synthetic
GFTFDDYT

SEQ ID NO: 861 - DNA, 24 bp, synthetic construct
  misc_feature 1..24: note = synthetic
  source 1..24: mol_type = other DNA
attagttggaatagtggtagcatg

SEQ ID NO: 862 - protein, 8 aa, synthetic construct
  REGION 1..8: note = synthetic
ISWNSGSM

SEQ ID NO: 863 - DNA, 48 bp, synthetic construct
  misc_feature 1..48: note = synthetic
  source 1..48: mol_type = other DNA
gcaaaagataagagtggctacggctccttctactacggtatggacgtc

SEQ ID NO: 864 - protein, 16 aa, synthetic construct
  REGION 1..16: note = synthetic
AKDKSGYGSFYYGMDV

SEQ ID NO: 865 - DNA, 324 bp, synthetic construct
  misc_feature 1..324: note = synthetic
  source 1..324: mol_type = other DNA
gaaattgtgttgacgcagtctccaggcaccctgtctttgtctccaggggacagagccaccctctcctgcagggccagtcagagtgtcagcagcatctacttagcctggtaccagcagaaacctggccaggctcccaggctcctcatccatggtgcgtccaccagggccactggcatcccagacaggttcagtggcagtgggtcagggacagacttcactctcaccatcagcagactggagcctgaagattttgcagtttattactgtcagcagcgtgctcactcaccgtacacttttggccaggggaccaagctggagatcaaa

SEQ ID NO: 866 - protein, 108 aa, synthetic construct
  REGION 1..108: note = synthetic
EIVLTQSPGTLSLSPGDRATLSCRASQSVSSIYLAWYQQKPGQAPRLLIHGASTRATGIPDRFSGSGSGTDFTLTISRLEPEDFAVYYCQQRAHSPYTFGQGTKLEIK

SEQ ID NO: 867 - DNA, 21 bp, synthetic construct
  misc_feature 1..21: note = synthetic
  source 1..21: mol_type = other DNA
cagagtgtcagcagcatctac

SEQ ID NO: 868 - protein, 7 aa, synthetic construct
  REGION 1..7: note = synthetic
QSVSSIY

SEQ ID NO: 869-870 - skipped (2 entries)

SEQ ID NO: 871 - DNA, 27 bp, synthetic construct
  misc_feature 1..27: note = synthetic
  source 1..27: mol_type = other DNA
cagcagcgtgctcactcaccgtacact

SEQ ID NO: 872 - protein, 9 aa, synthetic construct
  REGION 1..9: note = synthetic
QQRAHSPYT

SEQ ID NO: 873 - DNA, 369 bp, synthetic construct
  misc_feature 1..369: note = synthetic
  source 1..369: mol_type = other DNA
gaagtgcagctggtggagtctgggggaggcttggtacagcctggcaggtccctgagactctcctgtgcagcctctggcttcagctttgataattatgccatgcactgggtccggcaagctccaggacagggcctggagtgggtctcaggtattagttggaatagtggtagcagagactatgcggactctgtgaagggccgattcaccatctccagagacaatgccaggaactccctgtttctgcaaatgaacagtctgagtaatgaggacacggccatgtattactgcgcaaaagataagagtggctacggctcctacttctacggtatggacgtctggggccaagggaccacggtcaccgtctcctca

SEQ ID NO: 874 - protein, 123 aa, synthetic construct
  REGION 1..123: note = synthetic
EVQLVESGGGLVQPGRSLRLSCAASGFSFDNYAMHWVRQAPGQGLEWVSGISWNSGSRDYADSVKGRFTISRDNARNSLFLQMNSLSNEDTAMYYCAKDKSGYGSYFYGMDVWGQGTTVTVSS

SEQ ID NO: 875 - DNA, 24 bp, synthetic construct
  misc_feature 1..24: note = synthetic
  source 1..24: mol_type = other DNA
ggcttcagctttgataattatgcc

SEQ ID NO: 876 - protein, 8 aa, synthetic construct
  REGION 1..8: note = synthetic
GFSFDNYA

SEQ ID NO: 877 - DNA, 24 bp, synthetic construct
  misc_feature 1..24: note = synthetic
  source 1..24: mol_type = other DNA
attagttggaatagtggtagcaga

SEQ ID NO: 878 - protein, 8 aa, synthetic construct
  REGION 1..8: note = synthetic
ISWNSGSR

SEQ ID NO: 879 - DNA, 48 bp, synthetic construct
  misc_feature 1..48: note = synthetic
  source 1..48: mol_type = other DNA
gcaaaagataagagtggctacggctcctacttctacggtatggacgtc

SEQ ID NO: 880 - protein, 16 aa, synthetic construct
  REGION 1..16: note = synthetic
AKDKSGYGSYFYGMDV

SEQ ID NO: 881 - DNA, 324 bp, synthetic construct
  misc_feature 1..324: note = synthetic
  source 1..324: mol_type = other DNA
gaaattgtgttgacgcagtctccaggcaccctgtctttgtctccaggggacagagccaccctctcctgcagggccagtcagagtattagaaacatctatttagcctggtaccagcagaaacctggccaggctcccaggctcctcatccatggtgcgtccaccagggccactggcatcccagacaggttcagtggcagtgggtcagggacagacttcactctcaccatcagcagactggagcctgaagattttgcagtttattactgtcagcagcgtgttagtttaccgtacacttttggccaggggaccaagctggagatcaaa

SEQ ID NO: 882 - protein, 108 aa, synthetic construct
  REGION 1..108: note = synthetic
EIVLTQSPGTLSLSPGDRATLSCRASQSIRNIYLAWYQQKPGQAPRLLIHGASTRATGIPDRFSGSGSGTDFTLTISRLEPEDFAVYYCQQRVSLPYTFGQGTKLEIK

SEQ ID NO: 883 - DNA, 21 bp, synthetic construct
  misc_feature 1..21: note = synthetic
  source 1..21: mol_type = other DNA
cagagtattagaaacatctat

SEQ ID NO: 884 - protein, 7 aa, synthetic construct
  REGION 1..7: note = synthetic
QSIRNIY

SEQ ID NO: 885-886 - skipped (2 entries)

SEQ ID NO: 887 - DNA, 27 bp, synthetic construct
  misc_feature 1..27: note = synthetic
  source 1..27: mol_type = other DNA
cagcagcgtgttagtttaccgtacact

SEQ ID NO: 888 - protein, 9 aa, synthetic construct
  REGION 1..9: note = synthetic
QQRVSLPYT

SEQ ID NO: 889 - DNA, 369 bp, synthetic construct
  misc_feature 1..369: note = synthetic
  source 1..369: mol_type = other DNA
caggtgcagctggtggagtctgggggaggcttggtacagcctggcaggtccctgagactctcctgtgcagcctctggcttcagctttgatgattatgccatgcactgggtccggcaagctccaggacagggcctggagtgggtctcaggtattagttggaatggtggtagcagagactatgcggactctgtgaagggccgattcaccatctccagagacaacgccaggaactccctgtttctgcaaatgaacagtctgtttactgaggacacggccttgtattactgtgcaaaagataagagtggctacggctcctacttctacggtatggacgtctggggccaagggaccacggtcaccgtctcctca

SEQ ID NO: 890 - protein, 123 aa, synthetic construct
  REGION 1..123: note = synthetic
QVQLVESGGGLVQPGRSLRLSCAASGFSFDDYAMHWVRQAPGQGLEWVSGISWNGGSRDYADSVKGRFTISRDNARNSLFLQMNSLFTEDTALYYCAKDKSGYGSYFYGMDVWGQGTTVTVSS

SEQ ID NO: 891 - DNA, 24 bp, synthetic construct
  misc_feature 1..24: note = synthetic
  source 1..24: mol_type = other DNA
ggcttcagctttgatgattatgcc

SEQ ID NO: 892 - protein, 8 aa, synthetic construct
  REGION 1..8: note = synthetic
GFSFDDYA

SEQ ID NO: 893 - DNA, 24 bp, synthetic construct
  misc_feature 1..24: note = synthetic
  source 1..24: mol_type = other DNA
attagttggaatggtggtagcaga

SEQ ID NO: 894 - protein, 8 aa, synthetic construct
  REGION 1..8: note = synthetic
ISWNGGSR

SEQ ID NO: 895 - DNA, 48 bp, synthetic construct; identical to SEQ ID NO: 879
  misc_feature 1..48: note = synthetic
  source 1..48: mol_type = other DNA

SEQ ID NO: 896 - protein, 16 aa, synthetic construct
  REGION 1..16: note = synthetic
AKDKSGYGSYFYGMDV

SEQ ID NO: 897 - DNA, 324 bp, synthetic construct
  misc_feature 1..324: note = synthetic
  source 1..324: mol_type = other DNA
gaaattgtgttgacgcagtctccaggcattctgtctttgtctccaggggacagagccaccctctcctgcagggccagtcagagtattagaaacatctatttagcctggtaccagcagaaacctggccaggctcccaggctcctcatccatggtgcgtccaccagggccactggcatcccagacaggttcagtggcagtgggtcagggacagacttcactctcaccatcagcagactggagcctgaagattttgcagtttattactgtcagcagcgtgttagttcaccgtacacttttggccaggggaccaagctggagatcaaa

SEQ ID NO: 898 - protein, 108 aa, synthetic construct
  REGION 1..108: note = synthetic
EIVLTQSPGILSLSPGDRATLSCRASQSIRNIYLAWYQQKPGQAPRLLIHGASTRATGIPDRFSGSGSGTDFTLTISRLEPEDFAVYYCQQRVSSPYTFGQGTKLEIK

SEQ ID NO: 899 - DNA, 21 bp, synthetic construct
  misc_feature 1..21: note = synthetic
  source 1..21: mol_type = other DNA
cagagtattagaaacatctat

SEQ ID NO: 900 - protein, 7 aa, synthetic construct
  REGION 1..7: note = synthetic
QSIRNIY

SEQ ID NO: 901-902 - skipped (2 entries)

SEQ ID NO: 903 - DNA, 27 bp, synthetic construct
  misc_feature 1..27: note = synthetic
  source 1..27: mol_type = other DNA
cagcagcgtgttagttcaccgtacact

SEQ ID NO: 904 - protein, 9 aa, synthetic construct
  REGION 1..9: note = synthetic
QQRVSSPYT

SEQ ID NO: 905 - DNA, 369 bp, synthetic construct
  misc_feature 1..369: note = synthetic
  source 1..369: mol_type = other DNA
gaggtgcagctggtggagtctgggggaggcttggtacagcctggcaggtccctgagactctcctgtgcagcctctggattcacctttgatgattatgccatgcactgggtccggcaagctccaggaaagggcctggagtgggtctcaggtattagttggaatagtggtagcagagactatgcggactctgtgaagggccgattcaccatctccagagacaacgccaggaactccctgtttctgcaaatgaacagtctgagtactgaggacacggccttgtattactgtgcaaaagataagagtggctacggctcctactactacggtatggacgtctggggccaagggaccacggtcaccgtctcctca

SEQ ID NO: 906 - protein, 123 aa, synthetic construct
  REGION 1..123: note = synthetic
EVQLVESGGGLVQPGRSLRLSCAASGFTFDDYAMHWVRQAPGKGLEWVSGISWNSGSRDYADSVKGRFTISRDNARNSLFLQMNSLSTEDTALYYCAKDKSGYGSYYYGMDVWGQGTTVTVSS

SEQ ID NO: 907 - DNA, 24 bp, synthetic construct
  misc_feature 1..24: note = synthetic
  source 1..24: mol_type = other DNA
ggattcacctttgatgattatgcc

SEQ ID NO: 908 - protein, 8 aa, synthetic construct
  REGION 1..8: note = synthetic
GFTFDDYA

SEQ ID NO: 909 - DNA, 24 bp, synthetic construct
  misc_feature 1..24: note = synthetic
  source 1..24: mol_type = other DNA
attagttggaatagtggtagcaga

SEQ ID NO: 910 - protein, 8 aa, synthetic construct
  REGION 1..8: note = synthetic
ISWNSGSR

SEQ ID NO: 911 - DNA, 48 bp, synthetic construct
  misc_feature 1..48: note = synthetic
  source 1..48: mol_type = other DNA
gcaaaagataagagtggctacggctcctactactacggtatggacgtc

SEQ ID NO: 912 - protein, 16 aa, synthetic construct
  REGION 1..16: note = synthetic
AKDKSGYGSYYYGMDV

SEQ ID NO: 913 - DNA, 324 bp, synthetic construct
  misc_feature 1..324: note = synthetic
  source 1..324: mol_type = other DNA
gaaattgtgttgacgcagtctccaggcaccctgtctttgtctccaggggacagagccaccctctcctgcagggccagtcagagtattagaagcatctacttagcctggtaccagcagaaacctggccaggctcccaggctcctcatccatggtgcgtccaccagggccactggcatcccagacaggttcagtggcagtgggtcagggacagacttcactctcaccatcagcagactggagcctgaagattttgcagtttattactgtcagcagcgtgttagctcaccgtacacttttggccaggggaccaagctggagatcaaa

SEQ ID NO: 914 - protein, 108 aa, synthetic construct
  REGION 1..108: note = synthetic
EIVLTQSPGTLSLSPGDRATLSCRASQSIRSIYLAWYQQKPGQAPRLLIHGASTRATGIPDRFSGSGSGTDFTLTISRLEPEDFAVYYCQQRVSSPYTFGQGTKLEIK

SEQ ID NO: 915 - DNA, 21 bp, synthetic construct
  misc_feature 1..21: note = synthetic
  source 1..21: mol_type = other DNA
cagagtattagaagcatctac

SEQ ID NO: 916 - protein, 7 aa, synthetic construct
  REGION 1..7: note = synthetic
QSIRSIY

SEQ ID NO: 917-918 - skipped (2 entries)

SEQ ID NO: 919 - DNA, 27 bp, synthetic construct
  misc_feature 1..27: note = synthetic
  source 1..27: mol_type = other DNA
cagcagcgtgttagctcaccgtacact

SEQ ID NO: 920 - protein, 9 aa, synthetic construct
  REGION 1..9: note = synthetic
QQRVSSPYT

SEQ ID NO: 921 - DNA, 369 bp, synthetic construct
  misc_feature 1..369: note = synthetic
  source 1..369: mol_type = other DNA
gaagtgcagctggtggagtctgggggaggcttggtacagcctggcaggtccctgagactctcctgtgtagcctctggattcacctttgctgattttaccatgcactgggtccggcaagcgccagggaagggccttgagtgggtctcaggtattagttggaatagtaatagtatagactatgcggactctgtgaagggccgattcaccatctccagagacaacgccaagaaatccctgtttctgcaaatgtccagtctgagagctgaggacacggccttatattactgtgtcaaagacagaagcggatatagcagattctactacggtatggacgtctggggccaagggaccacggtcaccgtctcctca

SEQ ID NO: 922 - protein, 123 aa, synthetic construct
  REGION 1..123: note = synthetic
EVQLVESGGGLVQPGRSLRLSCVASGFTFADFTMHWVRQAPGKGLEWVSGISWNSNSIDYADSVKGRFTISRDNAKKSLFLQMSSLRAEDTALYYCVKDRSGYSRFYYGMDVWGQGTTVTVSS

SEQ ID NO: 923 - DNA, 24 bp, synthetic construct
  misc_feature 1..24: note = synthetic
  source 1..24: mol_type = other DNA
ggattcacctttgctgattttacc

SEQ ID NO: 924 - protein, 8 aa, synthetic construct
  REGION 1..8: note = synthetic
GFTFADFT

SEQ ID NO: 925 - DNA, 24 bp, synthetic construct
  misc_feature 1..24: note = synthetic
  source 1..24: mol_type = other DNA
attagttggaatagtaatagtata

SEQ ID NO: 926 - protein, 8 aa, synthetic construct
  REGION 1..8: note = synthetic
ISWNSNSI

SEQ ID NO: 927 - DNA, 48 bp, synthetic construct
  misc_feature 1..48: note = synthetic
  source 1..48: mol_type = other DNA
gtcaaagacagaagcggatatagcagattctactacggtatggacgtc

SEQ ID NO: 928 - protein, 16 aa, synthetic construct
  REGION 1..16: note = synthetic
VKDRSGYSRFYYGMDV

SEQ ID NO: 929 - DNA, 321 bp, synthetic construct
  misc_feature 1..321: note = synthetic
  source 1..321: mol_type = other DNA
gaaattgtgatgacgcagtctccagccaccctgtctgtgtctccaggggaaagagccatcctctcctgcagggccagtcagaatattaatagcaacttggcctggtaccagcagaaacctggccaggctcccaggctcctcatctatggtgcatccaccagggccactggtgtcccagccaggttcagtggcagtgggtctgggacagagttcactctcaccatccgcagcctgcaatctgaagattttgcagtttattactgtcaacaatattataattggccgatcactttcggccacgggacacgactggagattaaa

SEQ ID NO: 930 - protein, 107 aa, synthetic construct
  REGION 1..107: note = synthetic
EIVMTQSPATLSVSPGERAILSCRASQNINSNLAWYQQKPGQAPRLLIYGASTRATGVPARFSGSGSGTEFTLTIRSLQSEDFAVYYCQQYYNWPITFGHGTRLEIK

SEQ ID NO: 931 - DNA, 18 bp, synthetic construct
  misc_feature 1..18: note = synthetic
  source 1..18: mol_type = other DNA
cagaatattaatagcaac

SEQ ID NO: 932 - protein, 6 aa, synthetic construct
  REGION 1..6: note = synthetic
QNINSN

SEQ ID NO: 933-934 - skipped (2 entries)

SEQ ID NO: 935 - DNA, 27 bp, synthetic construct
  misc_feature 1..27: note = synthetic
  source 1..27: mol_type = other DNA
caacaatattataattggccgatcact

SEQ ID NO: 936 - protein, 9 aa, synthetic construct
  REGION 1..9: note = synthetic
QQYYNWPIT

SEQ ID NO: 937 - DNA, 369 bp, synthetic construct
  misc_feature 1..369: note = synthetic
  source 1..369: mol_type = other DNA
gaggtgcagctggtggagtctgggggaggcttggtacagcctggcaggtccctgagactctcctgtgcagcctctggattcacctttgatgattatgccatgcactgggtccggcaagctccaggaaagggcctggagtgggtctcaggtattagttggaatggtggtagtaaagactatgcggactctgtgaagggccgattcaccatctccagagacaacaccaggaactccctgtctctgcaaatgaacagtctgagaattgaagacacggccttatattactgtgcaaaagataagagtggctacggctccttctactacggtttggacgtctggggccaagggaccacggtcaccgtctcctca

SEQ ID NO: 938 - protein, 123 aa, synthetic construct
  REGION 1..123: note = synthetic
EVQLVESGGGLVQPGRSLRLSCAASGFTFDDYAMHWVRQAPGKGLEWVSGISWNGGSKDYADSVKGRFTISRDNTRNSLSLQMNSLRIEDTALYYCAKDKSGYGSFYYGLDVWGQGTTVTVSS

SEQ ID NO: 939 - DNA, 24 bp, synthetic construct
  misc_feature 1..24: note = synthetic
  source 1..24: mol_type = other DNA
ggattcacctttgatgattatgcc

SEQ ID NO: 940 - protein, 8 aa, synthetic construct
  REGION 1..8: note = synthetic
GFTFDDYA

SEQ ID NO: 941 - DNA, 24 bp, synthetic construct
  misc_feature 1..24: note = synthetic
  source 1..24: mol_type = other DNA
attagttggaatggtggtagtaaa

SEQ ID NO: 942 - protein, 8 aa, synthetic construct
  REGION 1..8: note = synthetic
ISWNGGSK

SEQ ID NO: 943 - DNA, 48 bp, synthetic construct
  misc_feature 1..48: note = synthetic
  source 1..48: mol_type = other DNA
gcaaaagataagagtggctacggctccttctactacggtttggacgtc

SEQ ID NO: 944 - protein, 16 aa, synthetic construct
  REGION 1..16: note = synthetic
AKDKSGYGSFYYGLDV

SEQ ID NO: 945 - DNA, 324 bp, synthetic construct
  misc_feature 1..324: note = synthetic
  source 1..324: mol_type = other DNA
gaaatagtgttgacacagtctccaggcaccctgtctttgtctccaggggacagagccaccctctcctgcagggccagtcagagtattagaagcatctacttagcctggtaccagcagaaacctggccaggctcccaggctcctcatccatggtgcgtccaccagggccactggcatcccagacaggttcagtggcagtgggtcagggacagacttcactctcaccatcagcagactggagcctgaagattttgcagtttattactgtcagcagcgtgttagctcaccgtacacttttggccaggggaccaagctggagatcaaa

SEQ ID NO: 946 - protein, 108 aa, synthetic construct; identical to SEQ ID NO: 914
  REGION 1..108: note = synthetic

SEQ ID NO: 947 - DNA, 21 bp, synthetic construct
  misc_feature 1..21: note = synthetic
  source 1..21: mol_type = other DNA
cagagtattagaagcatctac

SEQ ID NO: 948 - protein, 7 aa, synthetic construct
  REGION 1..7: note = synthetic
QSIRSIY

SEQ ID NO: 949-950 - skipped (2 entries)

SEQ ID NO: 951 - DNA, 27 bp, synthetic construct
  misc_feature 1..27: note = synthetic
  source 1..27: mol_type = other DNA
cagcagcgtgttagctcaccgtacact

SEQ ID NO: 952 - protein, 9 aa, synthetic construct
  REGION 1..9: note = synthetic
QQRVSSPYT

SEQ ID NO: 953 - DNA, 369 bp, synthetic construct
  misc_feature 1..369: note = synthetic
  source 1..369: mol_type = other DNA
gaggtgcagctggtggagtctgggggaggcttggtacagcctggcaggtccctgagactctcctgtgcagcctctggattcacctttgatgatttcaccatgcactgggtccggcaagctccaggaaagggcctggagtgggtctcagatattagttggaatagtggtagcatagactatgcggactctgtgaagggccgattcaccatttccagagacaatgccaggaactccctgtttctacaaatgagcagtctgagaactgaggacacggcctcgtattactgtataaaagataagagtggctacggctcctacaactacggtctggacgtctggggccaagggaccacggtcaccgtctcctca

SEQ ID NO: 954 - protein, 123 aa, synthetic construct
  REGION 1..123: note = synthetic
EVQLVESGGGLVQPGRSLRLSCAASGFTFDDFTMHWVRQAPGKGLEWVSDISWNSGSIDYADSVKGRFTISRDNARNSLFLQMSSLRTEDTASYYCIKDKSGYGSYNYGLDVWGQGTTVTVSS

SEQ ID NO: 955 - DNA, 24 bp, synthetic construct
  misc_feature 1..24: note = synthetic
  source 1..24: mol_type = other DNA
ggattcacctttgatgatttcacc

SEQ ID NO: 956 - protein, 8 aa, synthetic construct
  REGION 1..8: note = synthetic
GFTFDDFT

SEQ ID NO: 957 - DNA, 24 bp, synthetic construct
  misc_feature 1..24: note = synthetic
  source 1..24: mol_type = other DNA
attagttggaatagtggtagcata

SEQ ID NO: 958 - protein, 8 aa, synthetic construct
  REGION 1..8: note = synthetic
ISWNSGSI

SEQ ID NO: 959 - DNA, 48 bp, synthetic construct
  misc_feature 1..48: note = synthetic
  source 1..48: mol_type = other DNA
ataaaagataagagtggctacggctcctacaactacggtctggacgtc

SEQ ID NO: 960 - protein, 16 aa, synthetic construct
  REGION 1..16: note = synthetic
IKDKSGYGSYNYGLDV

SEQ ID NO: 961 - DNA, 324 bp, synthetic construct
  misc_feature 1..324: note = synthetic
  source 1..324: mol_type = other DNA
gaaattgtgttgacgcagtctccaggcaccctgtctttgtctccaggggacagagccaccctctcctgcagggccagtcagagtgttagcagcatctacttagcctggtaccagcagaaacctggccaggctcccaggctcctcatccatggtgcgtccaccagggccactggcatcccagacaggttcagtggcagtgggtcggggacagacttcactctcaccatcagcagactggagcctgaagattttgcactttattactgtcaccagcgtgttagttcaccgtacacttttggccaggggaccaagctggagatcaaa

SEQ ID NO: 962 - protein, 108 aa, synthetic construct
  REGION 1..108: note = synthetic
EIVLTQSPGTLSLSPGDRATLSCRASQSVSSIYLAWYQQKPGQAPRLLIHGASTRATGIPDRFSGSGSGTDFTLTISRLEPEDFALYYCHQRVSSPYTFGQGTKLEIK

SEQ ID NO: 963 - DNA, 21 bp, synthetic construct
  misc_feature 1..21: note = synthetic
  source 1..21: mol_type = other DNA
cagagtgttagcagcatctac

SEQ ID NO: 964 - protein, 7 aa, synthetic construct
  REGION 1..7: note = synthetic
QSVSSIY

SEQ ID NO: 965-966 - skipped (2 entries)

SEQ ID NO: 967 - DNA, 27 bp, synthetic construct
  misc_feature 1..27: note = synthetic
  source 1..27: mol_type = other DNA
caccagcgtgttagttcaccgtacact

SEQ ID NO: 968 - protein, 9 aa, synthetic construct
  REGION 1..9: note = synthetic
HQRVSSPYT

SEQ ID NO: 969 - DNA, 369 bp, synthetic construct
  misc_feature 1..369: note = synthetic
  source 1..369: mol_type = other DNA
gaggtgcagctggtggagtctgggggaggcttggtacagcctggcaggtccctgagactctcctgtgcagcctctggattcacctttgatgattatgccatgcactgggtccggcaagctccaggaaagggcctggagtgggtctcaggtattagttggaatagtggtagtaaagactatgcggactctgtgaagggccgattcaccatctccagagacaacaccaggaactccctgtttctgcaaatgaacagtctgagaactgaagacacggccttatattactgtgcaaaagataagagtggctacggctccttctactacggtatggacgtctggggccaagggaccacggtcaccgtctcctca

SEQ ID NO: 970 - protein, 123 aa, synthetic construct
  REGION 1..123: note = synthetic
EVQLVESGGGLVQPGRSLRLSCAASGFTFDDYAMHWVRQAPGKGLEWVSGISWNSGSKDYADSVKGRFTISRDNTRNSLFLQMNSLRTEDTALYYCAKDKSGYGSFYYGMDVWGQGTTVTVSS

SEQ ID NO: 971 - DNA, 24 bp, synthetic construct
  misc_feature 1..24: note = synthetic
  source 1..24: mol_type = other DNA
ggattcacctttgatgattatgcc

SEQ ID NO: 972 - protein, 8 aa, synthetic construct
  REGION 1..8: note = synthetic
GFTFDDYA

SEQ ID NO: 973 - DNA, 24 bp, synthetic construct
  misc_feature 1..24: note = synthetic
  source 1..24: mol_type = other DNA
attagttggaatagtggtagtaaa

SEQ ID NO: 974 - protein, 8 aa, synthetic construct
  REGION 1..8: note = synthetic
ISWNSGSK

SEQ ID NO: 975 - DNA, 48 bp, synthetic construct; identical to SEQ ID NO: 863
  misc_feature 1..48: note = synthetic
  source 1..48: mol_type = other DNA

SEQ ID NO: 976 - protein, 16 aa, synthetic construct
  REGION 1..16: note = synthetic
AKDKSGYGSFYYGMDV

SEQ ID NO: 977 - DNA, 318 bp, synthetic construct
  misc_feature 1..318: note = synthetic
  source 1..318: mol_type = other DNA
gacatccagatgacccagtctccttccaccctgtctgcatctgtaggagacagagtcaccatcacttgccgggccagtcagagtattagtagctggttggcctggtatcagcagaaaccagggaaagcccctaagctcctgatctataaggcgtctagtttagaaagtggggtcccatcaaggttcagcggcagtggatctgggacagaattcactctcaccatcagcagcctgcagcctgatgattttgcaacttattactgccaacagtataatagttattctccgttcggccaagggaccaaggtggaaatcaaa

SEQ ID NO: 978 - protein, 106 aa, synthetic construct
  REGION 1..106: note = synthetic
DIQMTQSPSTLSASVGDRVTITCRASQSISSWLAWYQQKPGKAPKLLIYKASSLESGVPSRFSGSGSGTEFTLTISSLQPDDFATYYCQQYNSYSPFGQGTKVEIK

SEQ ID NO: 979 - DNA, 18 bp, synthetic construct
  misc_feature 1..18: note = synthetic
  source 1..18: mol_type = other DNA
cagagtattagtagctgg

SEQ ID NO: 980 - protein, 6 aa, synthetic construct
  REGION 1..6: note = synthetic
QSISSW

SEQ ID NO: 981-982 - skipped (2 entries)

SEQ ID NO: 983 - DNA, 24 bp, synthetic construct
  misc_feature 1..24: note = synthetic
  source 1..24: mol_type = other DNA
caacagtataatagttattctccg

SEQ ID NO: 984 - protein, 8 aa, synthetic construct
  REGION 1..8: note = synthetic
QQYNSYSP

SEQ ID NO: 985 - DNA, 372 bp, synthetic construct
  misc_feature 1..372: note = synthetic
  source 1..372: mol_type = other DNA
caggtgcaactggtggagtctgggggaggcgtggtccagcctgggaggtccctgagactctcctgtgcagcctctggactcaccttcagtacctatgtcatgcactgggtccgccaggctccaggcaaggggctggcgtgggtggcagttatagcaaatgatggaagtaataaatattatgcagactccgtgaagggccgattcaccatctccagagacaactccaagaacacgctgtatctgcaaatgaatagcctgagacctgaggacacggctgtgtatttttgtgcgaaagaggggggtaccagtgggtcctactattactatggaatggacgtctggggtcaagggactacggtcaccgtctcctca

SEQ ID NO: 986 - protein, 124 aa, synthetic construct
  REGION 1..124: note = synthetic
QVQLVESGGGVVQPGRSLRLSCAASGLTFSTYVMHWVRQAPGKGLAWVAVIANDGSNKYYADSVKGRFTISRDNSKNTLYLQMNSLRPEDTAVYFCAKEGGTSGSYYYYGMDVWGQGTTVTVSS

SEQ ID NO: 987 - DNA, 24 bp, synthetic construct
  misc_feature 1..24: note = synthetic
  source 1..24: mol_type = other DNA
ggactcaccttcagtacctatgtc

SEQ ID NO: 988 - protein, 8 aa, synthetic construct
  REGION 1..8: note = synthetic
GLTFSTYV

SEQ ID NO: 989 - DNA, 24 bp, synthetic construct
  misc_feature 1..24: note = synthetic
  source 1..24: mol_type = other DNA
atagcaaatgatggaagtaataaa

SEQ ID NO: 990 - protein, 8 aa, synthetic construct
  REGION 1..8: note = synthetic
IANDGSNK

SEQ ID NO: 991 - DNA, 51 bp, synthetic construct
  misc_feature 1..51: note = synthetic
  source 1..51: mol_type = other DNA
gcgaaagaggggggtaccagtgggtcctactattactatggaatggacgtc

SEQ ID NO: 992 - protein, 17 aa, synthetic construct
  REGION 1..17: note = synthetic
AKEGGTSGSYYYYGMDV

SEQ ID NO: 993 - DNA, 342 bp, synthetic construct
  misc_feature 1..342: note = synthetic
  source 1..342: mol_type = other DNA
gacatccagatgacccagtctccagactccctggctgtgtctctgggcgagagggccaccatcaactgcaagtccagccagagtcttttattcaactccatcaataagaactacttagcttggtaccagcagaaaccaggacagcctcctaagcttctcctttactgggcatctacccgggaatccgggatccctgaccgattcagtggcagcgggtctgggacagatttcactctcaccatcaccagcctgcaggctgaagatgtggcactttattactgtcagcaatattatagtattccgtggacgttcggccaagggaccaaggtggaaatcaaacga

SEQ ID NO: 994 - protein, 114 aa, synthetic construct
  REGION 1..114: note = synthetic
DIQMTQSPDSLAVSLGERATINCKSSQSLLFNSINKNYLAWYQQKPGQPPKLLLYWASTRESGIPDRFSGSGSGTDFTLTITSLQAEDVALYYCQQYYSIPWTFGQGTKVEIKR

SEQ ID NO: 995 - DNA, 36 bp, synthetic construct
  misc_feature 1..36: note = synthetic
  source 1..36: mol_type = other DNA
cagagtcttttattcaactccatcaataagaactac

SEQ ID NO: 996 - protein, 12 aa, synthetic construct
  REGION 1..12: note = synthetic
QSLLFNSINKNY

SEQ ID NO: 997-998 - skipped (2 entries)

SEQ ID NO: 999 - DNA, 27 bp, synthetic construct
  misc_feature 1..27: note = synthetic
  source 1..27: mol_type = other DNA
cagcaatattatagtattccgtggacg

SEQ ID NO: 1000 - protein, 9 aa, synthetic construct
  REGION 1..9: note = synthetic
QQYYSIPWT

SEQ ID NO: 1001 - DNA, 354 bp, synthetic construct
  misc_feature 1..354: note = synthetic
  source 1..354: mol_type = other DNA
caggtgcagctggtggagtctggggctgaagtgaagaagcctggggcctcagtgaaggtctcctgcaagacttctggatacaccttcaccggctactatatgcactggatacgacaggcccctggacaagggcttgagtggatgggatggatcaaccctaaaagtggtggcacaaattatgcacagaagtttcagggcagggtcaccatgaccagggacacgtccatcagcacagcctacatggaactgagcaggctgagatccgacgacatggccgtgtattattgtgcgagaatgggggacggtgcagtgtttgacttctggggccagggaaccctggtcaccgtctcctca

SEQ ID NO: 1002 - protein, 118 aa, synthetic construct
  REGION 1..118: note = synthetic
QVQLVESGAEVKKPGASVKVSCKTSGYTFTGYYMHWIRQAPGQGLEWMGWINPKSGGTNYAQKFQGRVTMTRDTSISTAYMELSRLRSDDMAVYYCARMGDGAVFDFWGQGTLVTVSS

SEQ ID NO: 1003 - DNA, 24 bp, synthetic construct
  misc_feature 1..24: note = synthetic
  source 1..24: mol_type = other DNA
ggatacaccttcaccggctactat

SEQ ID NO: 1004 - protein, 8 aa, synthetic construct
  REGION 1..8: note = synthetic
GYTFTGYY

SEQ ID NO: 1005 - DNA, 24 bp, synthetic construct
  misc_feature 1..24: note = synthetic
  source 1..24: mol_type = other DNA
atcaaccctaaaagtggtggcaca

SEQ ID NO: 1006 - protein, 8 aa, synthetic construct
  REGION 1..8: note = synthetic
INPKSGGT

SEQ ID NO: 1007 - DNA, 33 bp, synthetic construct
  misc_feature 1..33: note = synthetic
  source 1..33: mol_type = other DNA
gcgagaatgggggacggtgcagtgtttgacttc

SEQ ID NO: 1008 - protein, 11 aa, synthetic construct
  REGION 1..11: note = synthetic
ARMGDGAVFDF

SEQ ID NO: 1009 - DNA, 324 bp, synthetic construct
  misc_feature 1..324: note = synthetic
  source 1..324: mol_type = other DNA
gccatccagatgacccagtctccatcctccctgtctgcatctgtaggagacagagtcaccatcacttgccgggcaagtcagaggattagcagctttttaaattggtatcagcagaaaccagggaaagcccctaagctcctgatctatactgcatccaatttacaaaatggggtcccatcaaggttcagtggcagtggatctgggacagatttcactctcactatcagcagtctgcaacctgaagattttgctacttactactgtcaacagagttacaggaccccgctcactttcggcggagggaccaaggtggaaatcaaacga

SEQ ID NO: 1010 - protein, 108 aa, synthetic construct
  REGION 1..108: note = synthetic
AIQMTQSPSSLSASVGDRVTITCRASQRISSFLNWYQQKPGKAPKLLIYTASNLQNGVPSRFSGSGSGTDFTLTISSLQPEDFATYYCQQSYRTPLTFGGGTKVEIKR

SEQ ID NO: 1011 - DNA, 18 bp, synthetic construct
  misc_feature 1..18: note = synthetic
  source 1..18: mol_type = other DNA
cagaggattagcagcttt

SEQ ID NO: 1012 - protein, 6 aa, synthetic construct
  REGION 1..6: note = synthetic
QRISSF

SEQ ID NO: 1013-1014 - skipped (2 entries)

SEQ ID NO: 1015 - DNA, 27 bp, synthetic construct
  misc_feature 1..27: note = synthetic
  source 1..27: mol_type = other DNA
caacagagttacaggaccccgctcact

SEQ ID NO: 1016 - protein, 9 aa, synthetic construct
  REGION 1..9: note = synthetic
QQSYRTPLT

SEQ ID NO: 1017 - DNA, 369 bp, synthetic construct
  misc_feature 1..369: note = synthetic
  source 1..369: mol_type = other DNA
gaggtgcagctggtggagtctgggggaggcttggtacagcctggcaggtccctgagactctcctgtgcagcctctggattcacctttgatgattataccatgcactgggtccggcaagctccagggaagggcctggagtgggtctcaggtattagttggaacagtggtagcataggctatgcggactctgtgaagggccgattcaccatttccagagacaacgccaagaactccctgtatttgcaaatgaacagtctgagagctgaggacacggccttgttttactgtgcaaaagatcaaagtggttacggccactactactacggtatggacgtctggggccaagggaccacggtcaccgtctcctca

SEQ ID NO: 1018 - protein, 123 aa, synthetic construct
  REGION 1..123: note = synthetic
EVQLVESGGGLVQPGRSLRLSCAASGFTFDDYTMHWVRQAPGKGLEWVSGISWNSGSIGYADSVKGRFTISRDNAKNSLYLQMNSLRAEDTALFYCAKDQSGYGHYYYGMDVWGQGTTVTVSS

SEQ ID NO: 1019 - DNA, 24 bp, synthetic construct
  misc_feature 1..24: note = synthetic
  source 1..24: mol_type = other DNA
ggattcacctttgatgattatacc

SEQ ID NO: 1020 - protein, 8 aa, synthetic construct
  REGION 1..8: note = synthetic
GFTFDDYT

SEQ ID NO: 1021 - DNA, 24 bp, synthetic construct
  misc_feature 1..24: note = synthetic
  source 1..24: mol_type = other DNA
attagttggaacagtggtagcata

SEQ ID NO: 1022 - protein, 8 aa, synthetic construct
  REGION 1..8: note = synthetic
ISWNSGSI

SEQ ID NO: 1023 - DNA, 48 bp, synthetic construct
  misc_feature 1..48: note = synthetic
  source 1..48: mol_type = other DNA
gcaaaagatcaaagtggttacggccactactactacggtatggacgtc

SEQ ID NO: 1024 - protein, 16 aa, synthetic construct
  REGION 1..16: note = synthetic
AKDQSGYGHYYYGMDV

SEQ ID NO: 1025 - DNA, 321 bp, synthetic construct
  misc_feature 1..321: note = synthetic
  source 1..321: mol_type = other DNA
gaaatagtgatgacgcagtctccagccaccctgtctgtgtctccaggggaaagagccaccctctcctgtagggccagtcagagtgttagcagcaacttagcctggtaccagcagaaacctggccaggctcccaggctcctcatctatggtgcatccaccagggccactgatatcccagccaggttcagtggcagtgggtctgggacagagttcactctcaccatcagcagcctgcagtctgaagattttgcagtttatcactgtcagcagtataataactggccgctcactttcggcggagggaccaaggtggagatcaaa

SEQ ID NO: 1026 - protein, 107 aa, synthetic construct
  REGION 1..107: note = synthetic
EIVMTQSPATLSVSPGERATLSCRASQSVSSNLAWYQQKPGQAPRLLIYGASTRATDIPARFSGSGSGTEFTLTISSLQSEDFAVYHCQQYNNWPLTFGGGTKVEIK

SEQ ID NO: 1027 - DNA, 18 bp, synthetic construct
  misc_feature 1..18: note = synthetic
  source 1..18: mol_type = other DNA
cagagtgttagcagcaac

SEQ ID NO: 1028 - protein, 6 aa, synthetic construct
  REGION 1..6: note = synthetic
QSVSSN

SEQ ID NO: 1029-1030 - skipped (2 entries)

SEQ ID NO: 1031 - DNA, 27 bp, synthetic construct
  misc_feature 1..27: note = synthetic
  source 1..27: mol_type = other DNA
cagcagtataataactggccgctcact

SEQ ID NO: 1032 - protein, 9 aa, synthetic construct
  REGION 1..9: note = synthetic
QQYNNWPLT

SEQ ID NO: 1033 - DNA, 387 bp, synthetic construct
  misc_feature 1..387: note = synthetic
  source 1..387: mol_type = other DNA
gaggtgcagctggtggagtctgggggaggcgtggtccagcctgggaggtccctgagactctcctgtgcagcctctggattcaccttcagttactatggcatgcactgggtccgccaggctccaggcaaggggctggagtgggtggcagttatatcatttgatggaaagaataaatattatgcagactccgtgatgggccgattcaccatctccagagacaattccaagaatacactgtatctgcaaatgaacagcctgagagctgaggactcggctgtgtttttctgtgcgaggtcttacgacattttgactggttatggagccggttacagctaccactacggtatggacgtctggggccaagggaccacggtcaccgtctcctca

SEQ ID NO: 1034 - protein, 129 aa, synthetic construct
  REGION 1..129: note = synthetic
EVQLVESGGGVVQPGRSLRLSCAASGFTFSYYGMHWVRQAPGKGLEWVAVISFDGKNKYYADSVMGRFTISRDNSKNTLYLQMNSLRAEDSAVFFCARSYDILTGYGAGYSYHYGMDVWGQGTTVTVSS

SEQ ID NO: 1035 - DNA, 24 bp, synthetic construct
  misc_feature 1..24: note = synthetic
  source 1..24: mol_type = other DNA
ggattcaccttcagttactatggc

SEQ ID NO: 1036 - protein, 8 aa, synthetic construct
  REGION 1..8: note = synthetic
GFTFSYYG

SEQ ID NO: 1037 - DNA, 24 bp, synthetic construct
  misc_feature 1..24: note = synthetic
  source 1..24: mol_type = other DNA
atatcatttgatggaaagaataaa

SEQ ID NO: 1038 - protein, 8 aa, synthetic construct
  REGION 1..8: note = synthetic
ISFDGKNK

SEQ ID NO: 1039 - DNA, 66 bp, synthetic construct
  misc_feature 1..66: note = synthetic
  source 1..66: mol_type = other DNA
gcgaggtcttacgacattttgactggttatggagccggttacagctaccactacggtatggacgtc

SEQ ID NO: 1040 - protein, 22 aa, synthetic construct
  REGION 1..22: note = synthetic
ARSYDILTGYGAGYSYHYGMDV

SEQ ID NO: 1041 - DNA, 324 bp, synthetic construct
  misc_feature 1..324: note = synthetic
  source 1..324: mol_type = other DNA
gccatccagatgacccagtctccatcctccctgtctgcatctgtaggagacagagtcaccatcacttgccgggcaagtcagaggattagcagctttttaaattggtatcagcagaaaccagggaaagcccctaagctcctaatctatactgcatccaatttacaaaatggggtcccatcaaggttcagtggcagtggatctgggacagatttcactctcaccatcagcagtctgcaacctgaagattttgcaacttactactgtcaacagagttacaggaccccgctcactttcggcggagggaccaaggtggagatcaaacga

SEQ ID NO: 1042 - protein, 108 aa, synthetic construct; identical to SEQ ID NO: 1010
  REGION 1..108: note = synthetic

SEQ ID NO: 1043 - DNA, 18 bp, synthetic construct
  misc_feature 1..18: note = synthetic
  source 1..18: mol_type = other DNA
cagaggattagcagcttt

SEQ ID NO: 1044 - protein, 6 aa, synthetic construct
  REGION 1..6: note = synthetic
QRISSF

SEQ ID NO: 1045-1046 - skipped (2 entries)

SEQ ID NO: 1047 - DNA, 27 bp, synthetic construct
  misc_feature 1..27: note = synthetic
  source 1..27: mol_type = other DNA
caacagagttacaggaccccgctcact

SEQ ID NO: 1048 - protein, 9 aa, synthetic construct
  REGION 1..9: note = synthetic
QQSYRTPLT

SEQ ID NO: 1049 - DNA, 354 bp, synthetic construct
  misc_feature 1..354: note = synthetic
  source 1..354: mol_type = other DNA
caggtgcagctggtggagtctggggctgaagtgaagaagcctggggcctcagtgaaggtctcctgcaagacttctggatacaccctctccggctattatatgcactggatgcgacaggcccctggacaagggcttgagtggatgggatggattaaccctaaaagtggtgtcacaaattatgcacagaagtttcaggacagagtcgccatgaccagggacacgtccatcagcacagcctacatggaactgagcaggctgagatctgacgacacggccgtgtattactgtgcgagaatgggggacggtgcagtgtttgacttctgggcccagggaaccctggtcaccgtctcctca

SEQ ID NO: 1050 - protein, 118 aa, synthetic construct
  REGION 1..118: note = synthetic
QVQLVESGAEVKKPGASVKVSCKTSGYTLSGYYMHWMRQAPGQGLEWMGWINPKSGVTNYAQKFQDRVAMTRDTSISTAYMELSRLRSDDTAVYYCARMGDGAVFDFWAQGTLVTVSS

SEQ ID NO: 1051 - DNA, 24 bp, synthetic construct
  misc_feature 1..24: note = synthetic
  source 1..24: mol_type = other DNA
ggatacaccctctccggctattat

SEQ ID NO: 1052 - protein, 8 aa, synthetic construct
  REGION 1..8: note = synthetic
GYTLSGYY

SEQ ID NO: 1053 - DNA, 24 bp, synthetic construct
  misc_feature 1..24: note = synthetic
  source 1..24: mol_type = other DNA
attaaccctaaaagtggtgtcaca

SEQ ID NO: 1054 - protein, 8 aa, synthetic construct
  REGION 1..8: note = synthetic
INPKSGVT

SEQ ID NO: 1055 - DNA, 33 bp, synthetic construct; identical to SEQ ID NO: 1007
  misc_feature 1..33: note = synthetic
  source 1..33: mol_type = other DNA

SEQ ID NO: 1056 - protein, 11 aa, synthetic construct
  REGION 1..11: note = synthetic
ARMGDGAVFDF

SEQ ID NO: 1057 - DNA, 324 bp, synthetic construct
  misc_feature 1..324: note = synthetic
  source 1..324: mol_type = other DNA
gacatccagttgacccagtctccatcctccctgtctgcatctgtaggagacagagtcaccatcacttgccgggcaagtcagaggattagcagctttttaaattggtatcagcagaaaccagggaaagcccctaagctcctaatctatactgcatccaatttacaaaatggggtcccatcaaggttcagtggcagtggatctgggacagatttcactctcaccatcagcagtctgcaacctgaagattttgcaacttactactgtcaacagagttacaggaccccgctcactttcggcggagggaccaagctggagatcaaacga

SEQ ID NO: 1058 - protein, 108 aa, synthetic construct
  REGION 1..108: note = synthetic
DIQLTQSPSSLSASVGDRVTITCRASQRISSFLNWYQQKPGKAPKLLIYTASNLQNGVPSRFSGSGSGTDFTLTISSLQPEDFATYYCQQSYRTPLTFGGGTKLEIKR

SEQ ID NO: 1059 - DNA, 18 bp, synthetic construct
  misc_feature 1..18: note = synthetic
  source 1..18: mol_type = other DNA
cagaggattagcagcttt

SEQ ID NO: 1060 - protein, 6 aa, synthetic construct
  REGION 1..6: note = synthetic
QRISSF

SEQ ID NO: 1061-1062 - skipped (2 entries)

SEQ ID NO: 1063 - DNA, 27 bp, synthetic construct
  misc_feature 1..27: note = synthetic
  source 1..27: mol_type = other DNA
caacagagttacaggaccccgctcact

SEQ ID NO: 1064 - protein, 9 aa, synthetic construct
  REGION 1..9: note = synthetic
QQSYRTPLT

SEQ ID NO: 1065 - DNA, 372 bp, synthetic construct
  misc_feature 1..372: note = synthetic
  source 1..372: mol_type = other DNA
caggtgcagctggtggagtctgggggaggcgtggtccagcctgggaggtccctgagactctcctgtgcagcctctggattcaccttcagtagctatggcatgcactgggtccgccaggctccaggcaaggggctggagtgggtgtcaactatatcatttgatggaagtaacaaatactatgcagactccgtgaagggccgattcaccatctccagagacaattccaagaacacgctgtatctgcaaatgaacagcctgagacctgaggacacggctgtgtattactgtgcgaaaggggggggtaccagtgggtcctacttttactacggtatggacgtctggggccaagggaccacggtcaccgtctcctca

SEQ ID NO: 1066 - protein, 124 aa, synthetic construct
  REGION 1..124: note = synthetic
QVQLVESGGGVVQPGRSLRLSCAASGFTFSSYGMHWVRQAPGKGLEWVSTISFDGSNKYYADSVKGRFTISRDNSKNTLYLQMNSLRPEDTAVYYCAKGGGTSGSYFYYGMDVWGQGTTVTVSS

SEQ ID NO: 1067 - DNA, 24 bp, synthetic construct
  misc_feature 1..24: note = synthetic
  source 1..24: mol_type = other DNA
ggattcaccttcagtagctatggc

SEQ ID NO: 1068 - protein, 8 aa, synthetic construct
  REGION 1..8: note = synthetic
GFTFSSYG

SEQ ID NO: 1069 - DNA, 24 bp, synthetic construct
  misc_feature 1..24: note = synthetic
  source 1..24: mol_type = other DNA
atatcatttgatggaagtaacaaa

SEQ ID NO: 1070 - protein, 8 aa, synthetic construct
  REGION 1..8: note = synthetic
ISFDGSNK

SEQ ID NO: 1071 - DNA, 51 bp, synthetic construct
  misc_feature 1..51: note = synthetic
  source 1..51: mol_type = other DNA
gcgaaaggggggggtaccagtgggtcctacttttactacggtatggacgtc

SEQ ID NO: 1072 - protein, 17 aa, synthetic construct
  REGION 1..17: note = synthetic
AKGGGTSGSYFYYGMDV

SEQ ID NO: 1073 - DNA, 324 bp, synthetic construct
  misc_feature 1..324: note = synthetic
  source 1..324: mol_type = other DNA
gccatccagatgacccagtctccatcctccctgtctgcatctgtaggagacagagtcaccatcacttgccgggcaagtcagaggattagcagctttttaaattggtatcagcagaaaccagggaaagcccctaagctcctaatctatactgcatccaatttacaaaatggggtcccatcaaggttcagtggcagtggatctgggacagatttcactctcaccatcagcagtctgcaacctgaagattttgcaacttactactgtcaacagagttacaggaccccgctcactttcggcggagggaccaagctggagatcaaacga

SEQ ID NO: 1074 - protein, 108 aa, synthetic construct
  REGION 1..108: note = synthetic
AIQMTQSPSSLSASVGDRVTITCRASQRISSFLNWYQQKPGKAPKLLIYTASNLQNGVPSRFSGSGSGTDFTLTISSLQPEDFATYYCQQSYRTPLTFGGGTKLEIKR

SEQ ID NO: 1075 - DNA, 18 bp, synthetic construct
  misc_feature 1..18: note = synthetic
  source 1..18: mol_type = other DNA
cagaggattagcagcttt

SEQ ID NO: 1076 - protein, 6 aa, synthetic construct
  REGION 1..6: note = synthetic
QRISSF

SEQ ID NO: 1077-1078 - skipped (2 entries)

SEQ ID NO: 1079 - DNA, 27 bp, synthetic construct
  misc_feature 1..27: note = synthetic
  source 1..27: mol_type = other DNA
caacagagttacaggaccccgctcact

SEQ ID NO: 1080 - protein, 9 aa, synthetic construct
  REGION 1..9: note = synthetic
QQSYRTPLT

SEQ ID NO: 1081 - DNA, 354 bp, synthetic construct
  misc_feature 1..354: note = synthetic
  source 1..354: mol_type = other DNA
caggttcagctggtgcagtctgggactgaggtgaagaagcctggggcctcaatgaaggtctcctgcaaggcttctggatacaccttcaccggctactatattcactgggtgcgacaggcccctggacaagggcttgagtggatgggatggatcaaccctaacagtgatgtcacaaagtatgcacagaagtttcagggcagggtcaccttgaccagggacacgtccatcagtgcagcctatattgacctgagcaggctgagatctgacgacacggccatttattactgtgcgagaatgggggacggtgcagtgtttgactactggggccagggaaccctggtcaccgtctcctca

SEQ ID NO: 1082 - protein, 118 aa, synthetic construct
  REGION 1..118: note = synthetic
QVQLVQSGTEVKKPGASMKVSCKASGYTFTGYYIHWVRQAPGQGLEWMGWINPNSDVTKYAQKFQGRVTLTRDTSISAAYIDLSRLRSDDTAIYYCARMGDGAVFDYWGQGTLVTVSS

SEQ ID NO: 1083 - DNA, 24 bp, synthetic construct
  misc_feature 1..24: note = synthetic
  source 1..24: mol_type = other DNA
ggatacaccttcaccggctactat

SEQ ID NO: 1084 - protein, 8 aa, synthetic construct
  REGION 1..8: note = synthetic
GYTFTGYY

SEQ ID NO: 1085 - DNA, 24 bp, synthetic construct
  misc_feature 1..24: note = synthetic
  source 1..24: mol_type = other DNA
atcaaccctaacagtgatgtcaca

SEQ ID NO: 1086 - protein, 8 aa, synthetic construct
  REGION 1..8: note = synthetic
INPNSDVT

SEQ ID NO: 1087 - DNA, 33 bp, synthetic construct
  misc_feature 1..33: note = synthetic
  source 1..33: mol_type = other DNA
gcgagaatgggggacggtgcagtgtttgactac

SEQ ID NO: 1088 - protein, 11 aa, synthetic construct
  REGION 1..11: note = synthetic
ARMGDGAVFDY

SEQ ID NO: 1089 - DNA, 324 bp, synthetic construct
  misc_feature 1..324: note = synthetic
  source 1..324: mol_type = other DNA
gacatccagttgacccagtctccatcctccctgtctgcatctgtaggagacagagtcaccatcacttgccgggcaagtcaacgcattagcagctatttaaattggtatcaacagaaaccagggaaagcccctaaggtgctgatctctgttgcatccagtttacaaagtggggtcccatcaaggttcagtggcagtggatttgggacagatttcactctcaccatcagcagtctgcaacctgaggattctgcatcttactactgtcaacagagttacaataccccgctcactttcggcggcgggaccaagctggagatcaaacga

SEQ ID NO: 1090 - protein, 108 aa, synthetic construct
  REGION 1..108: note = synthetic
DIQLTQSPSSLSASVGDRVTITCRASQRISSYLNWYQQKPGKAPKVLISVASSLQSGVPSRFSGSGFGTDFTLTISSLQPEDSASYYCQQSYNTPLTFGGGTKLEIKR

SEQ ID NO: 1091 - DNA, 18 bp, synthetic construct
  misc_feature 1..18: note = synthetic
  source 1..18: mol_type = other DNA
caacgcattagcagctat

SEQ ID NO: 1092 - protein, 6 aa, synthetic construct
  REGION 1..6: note = synthetic
QRISSY

SEQ ID NO: 1093-1094 - skipped (2 entries)

SEQ ID NO: 1095 - DNA, 27 bp, synthetic construct
  misc_feature 1..27: note = synthetic
  source 1..27: mol_type = other DNA
caacagagttacaataccccgctcact

SEQ ID NO: 1096 - protein, 9 aa, synthetic construct
  REGION 1..9: note = synthetic
QQSYNTPLT

SEQ ID NO: 1097 - DNA, 354 bp, synthetic construct
  misc_feature 1..354: note = synthetic
  source 1..354: mol_type = other DNA
gaggtgcagctggtggagtctggggctgaagtgaagaagcctggggcctcagtgaaggtctcctgcaagacttctggatacagtttcattggctattatatacactggatgcgacaggcccctggacaagggcttgaatggatgggatggatcaaccctaagagtggtgtcacaaattatgcacagaggtttcagggcagggtcaccatgaccagggacacgtccatcagtactgcctacatggaactgagcaggctgaaatctgacgacacggccgtgtatttctgtgcgagaatgggggacggtgcagtgtttgacttctggggccagggaaccctggtcaccgtctcctca

SEQ ID NO: 1098 - protein, 118 aa, synthetic construct
  REGION 1..118: note = synthetic
EVQLVESGAEVKKPGASVKVSCKTSGYSFIGYYIHWMRQAPGQGLEWMGWINPKSGVTNYAQRFQGRVTMTRDTSISTAYMELSRLKSDDTAVYFCARMGDGAVFDFWGQGTLVTVSS

SEQ ID NO: 1099 - DNA, 24 bp, synthetic construct
  misc_feature 1..24: note = synthetic
  source 1..24: mol_type = other DNA
ggatacagtttcattggctattat

SEQ ID NO: 1100 - protein, 8 aa, synthetic construct
  REGION 1..8: note = synthetic
GYSFIGYY

SEQ ID NO: 1101 - DNA, 24 bp, synthetic construct
  misc_feature 1..24: note = synthetic
  source 1..24: mol_type = other DNA
atcaaccctaagagtggtgtcaca

SEQ ID NO: 1102 - protein, 8 aa, synthetic construct
  REGION 1..8: note = synthetic
INPKSGVT

SEQ ID NO: 1103 - DNA, 33 bp, synthetic construct; identical to SEQ ID NO: 1007
  misc_feature 1..33: note = synthetic
  source 1..33: mol_type = other DNA

SEQ ID NO: 1104 - protein, 11 aa, synthetic construct
  REGION 1..11: note = synthetic
ARMGDGAVFDF

SEQ ID NO: 1105 - DNA, 324 bp, synthetic construct
  misc_feature 1..324: note = synthetic
  source 1..324: mol_type = other DNA
gacatccagttgacccagtctccatcctccctgtctgcatctgtaggagacagagtcaccatcacttgccgggcaagtcagaggattagcagctttttaaattggtatcagcagaaaccagggaaagtccctaagctcctgatctatactgcatccaatttacaaaatggggtcccatcaaggttcagtggcactggatctgggacagatttcactctcaccatcagcagtctgcaacctgaagattttgcaacttactactgtcaacagagttacaggaccccgctcactttcggcggagggaccaaagtggatatcaaacga

SEQ ID NO: 1106 - protein, 108 aa, synthetic construct
  REGION 1..108: note = synthetic
DIQLTQSPSSLSASVGDRVTITCRASQRISSFLNWYQQKPGKVPKLLIYTASNLQNGVPSRFSGTGSGTDFTLTISSLQPEDFATYYCQQSYRTPLTFGGGTKVDIKR

SEQ ID NO: 1107 - DNA, 18 bp, synthetic construct
  misc_feature 1..18: note = synthetic
  source 1..18: mol_type = other DNA
cagaggattagcagcttt

SEQ ID NO: 1108 - protein, 6 aa, synthetic construct
  REGION 1..6: note = synthetic
QRISSF

SEQ ID NO: 1109-1110 - skipped (2 entries)

SEQ ID NO: 1111 - DNA, 27 bp, synthetic construct
  misc_feature 1..27: note = synthetic
  source 1..27: mol_type = other DNA
caacagagttacaggaccccgctcact

SEQ ID NO: 1112 - protein, 9 aa, synthetic construct
  REGION 1..9: note = synthetic
QQSYRTPLT

SEQ ID NO: 1113 - DNA, 354 bp, synthetic construct
  misc_feature 1..354: note = synthetic
  source 1..354: mol_type = other DNA
gaggtgcagctggtggagtctggggctgaagtgaagaagcctggggcctcagtgaaggtctcctgcaagacttctggatacaccttcaccggctactatatgcactggatacgacaggcccctggacaagggcttgagtggatgggatggatcaaccctaaaagtggtggcacaaattatgcacagaagtttcagggcagggtcaccatgaccagggacacgtccatcagcacagcctacatggaactgagcaggctgagatccgacgacatggccgtgtattattgtgcgagaatgggggacggtgcagtgtttgacttctggggccagggaaccctggtcaccgtctcctca

SEQ ID NO: 1114 - protein, 118 aa, synthetic construct
  REGION 1..118: note = synthetic
EVQLVESGAEVKKPGASVKVSCKTSGYTFTGYYMHWIRQAPGQGLEWMGWINPKSGGTNYAQKFQGRVTMTRDTSISTAYMELSRLRSDDMAVYYCARMGDGAVFDFWGQGTLVTVSS

SEQ ID NO: 1115 - DNA, 24 bp, synthetic construct
  misc_feature 1..24: note = synthetic
  source 1..24: mol_type = other DNA
ggatacaccttcaccggctactat

SEQ ID NO: 1116 - protein, 8 aa, synthetic construct
  REGION 1..8: note = synthetic
GYTFTGYY

SEQ ID NO: 1117 - DNA, 24 bp, synthetic construct
  misc_feature 1..24: note = synthetic
  source 1..24: mol_type = other DNA
atcaaccctaaaagtggtggcaca

SEQ ID NO: 1118 - protein, 8 aa, synthetic construct
  REGION 1..8: note = synthetic
INPKSGGT

SEQ ID NO: 1119 - DNA, 33 bp, synthetic construct; identical to SEQ ID NO: 1007
  misc_feature 1..33: note = synthetic
  source 1..33: mol_type = other DNA

SEQ ID NO: 1120 - protein, 11 aa, synthetic construct
  REGION 1..11: note = synthetic
ARMGDGAVFDF

SEQ ID NO: 1121 - DNA, 327 bp, synthetic construct
  misc_feature 1..327: note = synthetic
  source 1..327: mol_type = other DNA
gacatcgtgatgacccagtctccatcctccctgtctgcatctgtaggagacagagtcaccatcacttgccgggcaagtcagagcattagcagctatttaaattggtatcagcagaaaccagggaaagcccctaagctcctgatctatgctgcatccagtttgcaaagtggggtcccatcaaggttcagtggcagtggatctgggacagatttcactctcaccatcagcagtctgcaacctgaagattttgcaacttactactgtcaacagagttacagtacccctccgctcactttcggcggagggaccaaagtggatatcaaacga

SEQ ID NO: 1122 - protein, 109 aa, synthetic construct
  REGION 1..109: note = synthetic
DIVMTQSPSSLSASVGDRVTITCRASQSISSYLNWYQQKPGKAPKLLIYAASSLQSGVPSRFSGSGSGTDFTLTISSLQPEDFATYYCQQSYSTPPLTFGGGTKVDIKR

SEQ ID NO: 1123 - DNA, 18 bp, synthetic construct
  misc_feature 1..18: note = synthetic
  source 1..18: mol_type = other DNA
cagagcattagcagctat

SEQ ID NO: 1124 - protein, 6 aa, synthetic construct
  REGION 1..6: note = synthetic
QSISSY

SEQ ID NO: 1125-1126 - skipped (2 entries)

SEQ ID NO: 1127 - DNA, 30 bp, synthetic construct
  misc_feature 1..30: note = synthetic
  source 1..30: mol_type = other DNA
caacagagttacagtacccctccgctcact

SEQ ID NO: 1128 - protein, 10 aa, synthetic construct
  REGION 1..10: note = synthetic
QQSYSTPPLT

SEQ ID NO: 1129 - DNA, 354 bp, synthetic construct
  misc_feature 1..354: note = synthetic
  source 1..354: mol_type = other DNA
caggttcagctggtgcagtctgggactgaggtgaagaagcctggggcctcagtgaaggtctcctgcaaggcttctggatacaccttcaccggctactatatgcactgggtgcgacaggcccctggacaagggcttgagtggatgggatggatcaaccctaacagtgatgtcacaaactatgcacagaagtttcagggcagggtcaccttgaccagggacacgtccatcagtacagcctacattgacctgagcaggctgagatctgacgacacggccatttattactgtgcgagaatgggggacggtgcagtgtttgactactggggccagggaaccctggtcaccgtctcctca

SEQ ID NO: 1130 - protein, 118 aa, synthetic construct
  REGION 1..118: note = synthetic
QVQLVQSGTEVKKPGASVKVSCKASGYTFTGYYMHWVRQAPGQGLEWMGWINPNSDVTNYAQKFQGRVTLTRDTSISTAYIDLSRLRSDDTAIYYCARMGDGAVFDYWGQGTLVTVSS

SEQ ID NO: 1131 - DNA, 24 bp, synthetic construct
  misc_feature 1..24: note = synthetic
  source 1..24: mol_type = other DNA
ggatacaccttcaccggctactat

SEQ ID NO: 1132 - protein, 8 aa, synthetic construct
  REGION 1..8: note = synthetic
GYTFTGYY

SEQ ID NO: 1133 - DNA, 24 bp, synthetic construct
  misc_feature 1..24: note = synthetic
  source 1..24: mol_type = other DNA
atcaaccctaacagtgatgtcaca

SEQ ID NO: 1134 - protein, 8 aa, synthetic construct
  REGION 1..8: note = synthetic
INPNSDVT

SEQ ID NO: 1135 - DNA, 33 bp, synthetic construct; identical to SEQ ID NO: 1087
  misc_feature 1..33: note = synthetic
  source 1..33: mol_type = other DNA

SEQ ID NO: 1136 - protein, 11 aa, synthetic construct
  REGION 1..11: note = synthetic
ARMGDGAVFDY

SEQ ID NO: 1137 - DNA, 324 bp, synthetic construct
  misc_feature 1..324: note = synthetic
  source 1..324: mol_type = other DNA
gacatccagatgacccagtctccatcctccctgtctgcatctgtaggagacagagtcaccatcacttgccgggcaagtcagcgcattagcagctatttaaattggtatcagcagaaaccagggaaagcccctaaggtgctgatctctgttgcatccagtttgcaaagtggggtcccatcaaggttcagtggcagtggatctgggacagatttcactctcaccattagtagtctgcaacctgaggattttgcatcttactactgtcaacagagttacaataccccgctcactttcggcggagggaccaaggtggagatcaaacga

SEQ ID NO: 1138 - protein, 108 aa, synthetic construct
  REGION 1..108: note = synthetic
DIQMTQSPSSLSASVGDRVTITCRASQRISSYLNWYQQKPGKAPKVLISVASSLQSGVPSRFSGSGSGTDFTLTISSLQPEDFASYYCQQSYNTPLTFGGGTKVEIKR

SEQ ID NO: 1139 - DNA, 18 bp, synthetic construct
  misc_feature 1..18: note = synthetic
  source 1..18: mol_type = other DNA
cagcgcattagcagctat

SEQ ID NO: 1140 - protein, 6 aa, synthetic construct
  REGION 1..6: note = synthetic
QRISSY

SEQ ID NO: 1141-1142 - skipped (2 entries)

SEQ ID NO: 1143 - DNA, 27 bp, synthetic construct
  misc_feature 1..27: note = synthetic
  source 1..27: mol_type = other DNA
caacagagttacaataccccgctcact

SEQ ID NO: 1144 - protein, 9 aa, synthetic construct
  REGION 1..9: note = synthetic
QQSYNTPLT

SEQ ID NO: 1145 - DNA, 381 bp, synthetic construct
  misc_feature 1..381: note = synthetic
  source 1..381: mol_type = other DNA
caggtgcagctggtgcagtctgggggaggcttggtcaagcctggggggtccctgagactctcctgtgcagcctctggattcaccttcagtagctatgacatgagctgggtccgccaggctccagggaaggggctggagtgggtttcatacattagtagtagtggtaataccatacattacgcagactctgtgaagggccgattcaccatctccagagacaattccaagaactcactttatctgcaaatgaacagcctgagagccgaggacacggccgtgtattactgtgcgaaagccggtcccgctacggtgacacggaggtactactactactacggtttggacgtctggggccaagggaccacggtcaccgtctcctca

SEQ ID NO: 1146 - protein, 127 aa, synthetic construct
  REGION 1..127: note = synthetic
QVQLVQSGGGLVKPGGSLRLSCAASGFTFSSYDMSWVRQAPGKGLEWVSYISSSGNTIHYADSVKGRFTISRDNSKNSLYLQMNSLRAEDTAVYYCAKAGPATVTRRYYYYYGLDVWGQGTTVTVSS

SEQ ID NO: 1147 - DNA, 24 bp, synthetic construct
  misc_feature 1..24: note = synthetic
  source 1..24: mol_type = other DNA
ggattcaccttcagtagctatgac

SEQ ID NO: 1148 - protein, 8 aa, synthetic construct
  REGION 1..8: note = synthetic
GFTFSSYD

SEQ ID NO: 1149 - DNA, 24 bp, synthetic construct
  misc_feature 1..24: note = synthetic
  source 1..24: mol_type = other DNA
attagtagtagtggtaataccata

SEQ ID NO: 1150 - protein, 8 aa, synthetic construct
  REGION 1..8: note = synthetic
ISSSGNTI

SEQ ID NO: 1151 - DNA, 60 bp, synthetic construct
  misc_feature 1..60: note = synthetic
  source 1..60: mol_type = other DNA
gcgaaagccggtcccgctacggtgacacggaggtactactactactacggtttggacgtc

SEQ ID NO: 1152 - protein, 20 aa, synthetic construct
  REGION 1..20: note = synthetic
AKAGPATVTRRYYYYYGLDV

SEQ ID NO: 1153 - DNA, 324 bp, synthetic construct
  misc_feature 1..324: note = synthetic
  source 1..324: mol_type = other DNA
gacatcgtgatgacccagtctccatcctccctgtctgcatctgtacgagacagagtcaccatcacttgccgggcaagtcagagaattagcagctatttaaattggtttcagcagaaaccagggaaagcccctaaggtcctgatctatactgcatccagtttgcaaaatggggtcccatcaaggttcagtggcagtggatctgggacagatttcactctcaccatcagcagtctgcaacctgaagactttgcaacttactactgtcagcagagttacaggaccccgctcactttcggcggagggaccaaggtggagatcaaacga

SEQ ID NO: 1154 - protein, 108 aa, synthetic construct
  REGION 1..108: note = synthetic
DIVMTQSPSSLSASVRDRVTITCRASQRISSYLNWFQQKPGKAPKVLIYTASSLQNGVPSRFSGSGSGTDFTLTISSLQPEDFATYYCQQSYRTPLTFGGGTKVEIKR

SEQ ID NO: 1155 - DNA, 18 bp, synthetic construct
  misc_feature 1..18: note = synthetic
  source 1..18: mol_type = other DNA
cagagaattagcagctat

SEQ ID NO: 1156 - protein, 6 aa, synthetic construct
  REGION 1..6: note = synthetic
QRISSY

SEQ ID NO: 1157-1158 - skipped (2 entries)

SEQ ID NO: 1159 - DNA, 27 bp, synthetic construct
  misc_feature 1..27: note = synthetic
  source 1..27: mol_type = other DNA
cagcagagttacaggaccccgctcact

SEQ ID NO: 1160 - protein, 9 aa, synthetic construct
  REGION 1..9: note = synthetic
QQSYRTPLT

SEQ ID NO: 1161 - DNA, 354 bp, synthetic construct
  misc_feature 1..354: note = synthetic
  source 1..354: mol_type = other DNA
caggtgcagctggtacagtctggggctgaggtgaagaagcctggggcctcagtgaaggtctcctgcaaggcttctggatacacattcatcggctactatatgcactgggtgcgacaggcccctggacaagggcttgagtggatgggatggatcaaccctaaaagtggtggcacaaactatgcacagaagtttcagggcagggtcaccatgaccggggacacgtccatcagcacagcctacatggagctgagcaggctgagatctgacgacacggccgtgttttactgtgcgagaatgggggacggtgcaatgtttgactactggggccagggaaccctggtcaccgtctcctca

SEQ ID NO: 1162 - protein, 118 aa, synthetic construct
  REGION 1..118: note = synthetic
QVQLVQSGAEVKKPGASVKVSCKASGYTFIGYYMHWVRQAPGQGLEWMGWINPKSGGTNYAQKFQGRVTMTGDTSISTAYMELSRLRSDDTAVFYCARMGDGAMFDYWGQGTLVTVSS

SEQ ID NO: 1163 - DNA, 24 bp, synthetic construct
  misc_feature 1..24: note = synthetic
  source 1..24: mol_type = other DNA
ggatacacattcatcggctactat

SEQ ID NO: 1164 - protein, 8 aa, synthetic construct
  REGION 1..8: note = synthetic
GYTFIGYY

SEQ ID NO: 1165 - DNA, 24 bp, synthetic construct
  misc_feature 1..24: note = synthetic
  source 1..24: mol_type = other DNA
atcaaccctaaaagtggtggcaca

SEQ ID NO: 1166 - protein, 8 aa, synthetic construct
  REGION 1..8: note = synthetic
INPKSGGT

SEQ ID NO: 1167 - DNA, 33 bp, synthetic construct
  misc_feature 1..33: note = synthetic
  source 1..33: mol_type = other DNA
gcgagaatgggggacggtgcaatgtttgactac

SEQ ID NO: 1168 - protein, 11 aa, synthetic construct
  REGION 1..11: note = synthetic
ARMGDGAMFDY

SEQ ID NO: 1169 - DNA, 321 bp, synthetic construct
  misc_feature 1..321: note = synthetic
  source 1..321: mol_type = other DNA
gacatccagatgacccagtctccatcctccctgtctgcatctgtaggagacagagtcaccatcacttgccgggcaagtcagagaattagcagctatttaaattggtatcagcagaaagcagggaaagcccctaaggtcctgatctatactgcatccagtttgcaaagtggggtcccatcacgattcagtggcagtggatctgggacagatttcactctcaccatcagcagtctgcaacctgaagattttgcaacttactactgtcaacagagttacagtaccccgctcactttcggcggagggaccaaggtggagatcaaa

SEQ ID NO: 1170 - protein, 107 aa, synthetic construct
  REGION 1..107: note = synthetic
DIQMTQSPSSLSASVGDRVTITCRASQRISSYLNWYQQKAGKAPKVLIYTASSLQSGVPSRFSGSGSGTDFTLTISSLQPEDFATYYCQQSYSTPLTFGGGTKVEIK

SEQ ID NO: 1171 - DNA, 18 bp, synthetic construct
  misc_feature 1..18: note = synthetic
  source 1..18: mol_type = other DNA
cagagaattagcagctat

SEQ ID NO: 1172 - protein, 6 aa, synthetic construct
  REGION 1..6: note = synthetic
QRISSY

SEQ ID NO: 1173-1174 - skipped (2 entries)

SEQ ID NO: 1175 - DNA, 27 bp, synthetic construct
  misc_feature 1..27: note = synthetic
  source 1..27: mol_type = other DNA
caacagagttacagtaccccgctcact

SEQ ID NO: 1176 - protein, 9 aa, synthetic construct
  REGION 1..9: note = synthetic
QQSYSTPLT

SEQ ID NO: 1177 - DNA, 375 bp, synthetic construct
  misc_feature 1..375: note = synthetic
  source 1..375: mol_type = other DNA
caggtgcagctggtacagtctgggggaggcgtggtacagcctggggggtccctgagactctcctgtgcagcctctggattcacctttgatgattatgccatgcactgggtccgtcaagctccagggaagggtctggagtgggtctctcttattagtggggatggtggtagcacatactatgcagactctgtgaagggccgattcaccatctccagagacaacagcaaaaactccctgtatctgcaaatgaacagtctgagaactgaggacaccgccttgtattactgtgcaaaagatgatagcagctcgtcctggtactactactactacggtatggacgtctggggccgagggaccacggtcaccgtctcctca

SEQ ID NO: 1178 - protein, 125 aa, synthetic construct
  REGION 1..125: note = synthetic
QVQLVQSGGGVVQPGGSLRLSCAASGFTFDDYAMHWVRQAPGKGLEWVSLISGDGGSTYYADSVKGRFTISRDNSKNSLYLQMNSLRTEDTALYYCAKDDSSSSWYYYYYGMDVWGRGTTVTVSS

SEQ ID NO: 1179 - DNA, 24 bp, synthetic construct
  misc_feature 1..24: note = synthetic
  source 1..24: mol_type = other DNA
ggattcacctttgatgattatgcc

SEQ ID NO: 1180 - protein, 8 aa, synthetic construct
  REGION 1..8: note = synthetic
GFTFDDYA

SEQ ID NO: 1181 - DNA, 24 bp, synthetic construct
  misc_feature 1..24: note = synthetic
  source 1..24: mol_type = other DNA
attagtggggatggtggtagcaca

SEQ ID NO: 1182 - protein, 8 aa, synthetic construct
  REGION 1..8: note = synthetic
ISGDGGST

SEQ ID NO: 1183 - DNA, 54 bp, synthetic construct
  misc_feature 1..54: note = synthetic
  source 1..54: mol_type = other DNA
gcaaaagatgatagcagctcgtcctggtactactactactacggtatggacgtc

SEQ ID NO: 1184 - protein, 18 aa, synthetic construct
  REGION 1..18: note = synthetic
AKDDSSSSWYYYYYGMDV

SEQ ID NO: 1185 - DNA, 324 bp, synthetic construct
  misc_feature 1..324: note = synthetic
  source 1..324: mol_type = other DNA
gacatccagatgacccagtctccatcctccctgtctgcatctgtaggagacagagtcaccatcacttgccgggcaagtcagcgcattagcagctatttaaattggtatcagcagaaaccagggaaagcccctaaggtgctgatctctgttgcatccagtttgcaaagtggggtcccatcaaggttcagtggcagtggatctgggacagatttcactctcaccatcagcagtctgcaacctgaggattttgcatcttactactgtcaacagagttacaataccccgctcactttcggcggagggaccaaggtggagatcaaacga

SEQ ID NO: 1186 - protein, 108 aa, synthetic construct; identical to SEQ ID NO: 1138
  REGION 1..108: note = synthetic

SEQ ID NO: 1187 - DNA, 18 bp, synthetic construct
  misc_feature 1..18: note = synthetic
  source 1..18: mol_type = other DNA
cagcgcattagcagctat

SEQ ID NO: 1188 - protein, 6 aa, synthetic construct
  REGION 1..6: note = synthetic
QRISSY

SEQ ID NO: 1189-1190 - skipped (2 entries)

SEQ ID NO: 1191 - DNA, 27 bp, synthetic construct
  misc_feature 1..27: note = synthetic
  source 1..27: mol_type = other DNA
caacagagttacaataccccgctcact

SEQ ID NO: 1192 - protein, 9 aa, synthetic construct
  REGION 1..9: note = synthetic
QQSYNTPLT

SEQ ID NO: 1193 - DNA, 372 bp, synthetic construct
  misc_feature 1..372: note = synthetic
  source 1..372: mol_type = other DNA
gaggtgcagctggtggagtctgggggaggcttggtacagcctggcaggtccctgagactctcctgtgcagcctctggattcacctttggtgattataccatgcactgggtccggcaagctccagggaagggcctggagtgggtctccgatattagttggaatagtggtagcaaagactatgcggactctgtgaagggccgattcaccatctccagagacaacgccaagaactccctctatcttcaaatgaacagtctgagaactgaggatacggccttttattactgtgcaaaagatagtaggggctacggtctctactaccacctcggtttggacgtctggggccaagggaccacggtcaccgtctcctca

SEQ ID NO: 1194 - protein, 124 aa, synthetic construct
  REGION 1..124: note = synthetic
EVQLVESGGGLVQPGRSLRLSCAASGFTFGDYTMHWVRQAPGKGLEWVSDISWNSGSKDYADSVKGRFTISRDNAKNSLYLQMNSLRTEDTAFYYCAKDSRGYGLYYHLGLDVWGQGTTVTVSS

SEQ ID NO: 1195 - DNA, 24 bp, synthetic construct
  misc_feature 1..24: note = synthetic
  source 1..24: mol_type = other DNA
ggattcacctttggtgattatacc

SEQ ID NO: 1196 - protein, 8 aa, synthetic construct
  REGION 1..8: note = synthetic
GFTFGDYT

SEQ ID NO: 1197 - DNA, 24 bp, synthetic construct
  misc_feature 1..24: note = synthetic
  source 1..24: mol_type = other DNA
attagttggaatagtggtagcaaa

SEQ ID NO: 1198 - protein, 8 aa, synthetic construct
  REGION 1..8: note = synthetic
ISWNSGSK

SEQ ID NO: 1199 - DNA, 51 bp, synthetic construct
  misc_feature 1..51: note = synthetic
  source 1..51: mol_type = other DNA
gcaaaagatagtaggggctacggtctctactaccacctcggtttggacgtc

SEQ ID NO: 1200 - protein, 17 aa, synthetic construct
  REGION 1..17: note = synthetic
AKDSRGYGLYYHLGLDV

SEQ ID NO: 1201 - DNA, 372 bp, synthetic construct
  misc_feature 1..372: note = synthetic
  source 1..372: mol_type = other DNA
gaggtgcagctggtggagtctgggggaggcttggtgcagcctggcaggtccctgagactctcctgtgcagcctctggattcacctttgctgattataccatgcactgggtccggcaagctccagggaagggcctggagtgggtctcagatattagttggaatagtggtagtatagcctatgcggactctgtgaagggccgattcaccatctccagagacaacgccaagaactccctctatcttcaaatgaacagtctgagaactgaggacacggccttttattactgtgcaaaagatagtaggggctacggtcactataagtacctcggtttggacgtctggggccaagggaccacggtcaccgtctcctca

SEQ ID NO: 1202 - protein, 124 aa, synthetic construct
  REGION 1..124: note = synthetic
EVQLVESGGGLVQPGRSLRLSCAASGFTFADYTMHWVRQAPGKGLEWVSDISWNSGSIAYADSVKGRFTISRDNAKNSLYLQMNSLRTEDTAFYYCAKDSRGYGHYKYLGLDVWGQGTTVTVSS

SEQ ID NO: 1203 - DNA, 24 bp, synthetic construct
  misc_feature 1..24: note = synthetic
  source 1..24: mol_type = other DNA
ggattcacctttgctgattatacc

SEQ ID NO: 1204 - protein, 8 aa, synthetic construct
  REGION 1..8: note = synthetic
GFTFADYT

SEQ ID NO: 1205 - DNA, 24 bp, synthetic construct
  misc_feature 1..24: note = synthetic
  source 1..24: mol_type = other DNA
attagttggaatagtggtagtata

SEQ ID NO: 1206 - protein, 8 aa, synthetic construct
  REGION 1..8: note = synthetic
ISWNSGSI

SEQ ID NO: 1207 - DNA, 51 bp, synthetic construct
  misc_feature 1..51: note = synthetic
  source 1..51: mol_type = other DNA
gcaaaagatagtaggggctacggtcactataagtacctcggtttggacgtc

SEQ ID NO: 1208 - protein, 17 aa, synthetic construct
  REGION 1..17: note = synthetic
AKDSRGYGHYKYLGLDV

SEQ ID NO: 1209 - DNA, 372 bp, synthetic construct
  misc_feature 1..372: note = synthetic
  source 1..372: mol_type = other DNA
gaggtgcagctggtggagtctgggggaggcatggtacagcctggcaggtccctgagactctcctgtgcagcctctggattccccttcaatgattacaccatgcactgggtccggcaagtcccagggaggggcctggagtgggtctcagatattagttggaatagcggcagtaaaggctatgcggactctgtgaagggtcgattcatcatctccagagacaacgccaagaactccctgtacctgcaaatgaacagtctgagagttgaagacacggccttgtattactgtgtaaaagatggaagtggctacgggaggttccattattacgctatggacgtctggggccaagggaccacggtcaccgtctcctca

SEQ ID NO: 1210 - protein, 124 aa, synthetic construct
  REGION 1..124: note = synthetic
EVQLVESGGGMVQPGRSLRLSCAASGFPFNDYTMHWVRQVPGRGLEWVSDISWNSGSKGYADSVKGRFIISRDNAKNSLYLQMNSLRVEDTALYYCVKDGSGYGRFHYYAMDVWGQGTTVTVSS

SEQ ID NO: 1211 - DNA, 24 bp, synthetic construct
  misc_feature 1..24: note = synthetic
  source 1..24: mol_type = other DNA
ggattccccttcaatgattacacc

SEQ ID NO: 1212 - protein, 8 aa, synthetic construct
  REGION 1..8: note = synthetic
GFPFNDYT

SEQ ID NO: 1213 - DNA, 24 bp, synthetic construct
  misc_feature 1..24: note = synthetic
  source 1..24: mol_type = other DNA
attagttggaatagcggcagtaaa

SEQ ID NO: 1214 - protein, 8 aa, synthetic construct
  REGION 1..8: note = synthetic
ISWNSGSK

SEQ ID NO: 1215 - DNA, 51 bp, synthetic construct
  misc_feature 1..51: note = synthetic
  source 1..51: mol_type = other DNA
gtaaaagatggaagtggctacgggaggttccattattacgctatggacgtc

SEQ ID NO: 1216 - protein, 17 aa, synthetic construct
  REGION 1..17: note = synthetic
VKDGSGYGRFHYYAMDV

SEQ ID NO: 1217 - DNA, 372 bp, synthetic construct
  misc_feature 1..372: note = synthetic
  source 1..372: mol_type = other DNA
gaggtgcagctggtggagtctggtggaggcttggtacagcctggcaggtccctgagactctcctgtgcagcctctggattcacctttgctgattataccatgcactgggtccgccaagttccagggaagggcctggagtgggtctcagatattagttggaatagtggtagcaaagactatgcggactctgtgaagggccgcttcaccatctccagagacaacgccaagaatttcctgtatctgcaaatgaacagtctgagagctgaagacacggccttgtattactgtgtaaaatatggaagtggctacgggaaattctacttctacgctatggacgtctggggccaagggaccacggtcaccgtctcctca

SEQ ID NO: 1218 - protein, 124 aa, synthetic construct
  REGION 1..124: note = synthetic
EVQLVESGGGLVQPGRSLRLSCAASGFTFADYTMHWVRQVPGKGLEWVSDISWNSGSKDYADSVKGRFTISRDNAKNFLYLQMNSLRAEDTALYYCVKYGSGYGKFYFYAMDVWGQGTTVTVSS

SEQ ID NO: 1219 - DNA, 24 bp, synthetic construct
  misc_feature 1..24: note = synthetic
  source 1..24: mol_type = other DNA
ggattcacctttgctgattatacc

SEQ ID NO: 1220 - protein, 8 aa, synthetic construct
  REGION 1..8: note = synthetic
GFTFADYT

SEQ ID NO: 1221 - DNA, 24 bp, synthetic construct
  misc_feature 1..24: note = synthetic
  source 1..24: mol_type = other DNA
attagttggaatagtggtagcaaa

SEQ ID NO: 1222 - protein, 8 aa, synthetic construct
  REGION 1..8: note = synthetic
ISWNSGSK

SEQ ID NO: 1223 - DNA, 51 bp, synthetic construct
  misc_feature 1..51: note = synthetic
  source 1..51: mol_type = other DNA
gtaaaatatggaagtggctacgggaaattctacttctacgctatggacgtc

SEQ ID NO: 1224 - protein, 17 aa, synthetic construct
  REGION 1..17: note = synthetic
VKYGSGYGKFYFYAMDV

SEQ ID NO: 1225 - DNA, 372 bp, synthetic construct
  misc_feature 1..372: note = synthetic
  source 1..372: mol_type = other DNA
gaggtgcagctggtgcagtctgggggaggcttggtacagcctggcaggtccctgagactctcctgtgcagcctctggattcacctttgctgattataccatgcactgggtccggcaaactccagggaagggcctggagtgggtctcaggtattagttggaatagtggtagcaaagactatgcggactctgtgaagggccgattcaccatctccagagacaacgccaagaactccctgtatctgcaaatgaacagtctgagaactgaggacacggccttgtattactgtgcaaaatatggaagtggctacgggagatatttcttctacgctatggacgtctggggccaagggaccacggtcaccgtctcctca

SEQ ID NO: 1226 - protein, 124 aa, synthetic construct
  REGION 1..124: note = synthetic
EVQLVQSGGGLVQPGRSLRLSCAASGFTFADYTMHWVRQTPGKGLEWVSGISWNSGSKDYADSVKGRFTISRDNAKNSLYLQMNSLRTEDTALYYCAKYGSGYGRYFFYAMDVWGQGTTVTVSS

SEQ ID NO: 1227 - DNA, 24 bp, synthetic construct
  misc_feature 1..24: note = synthetic
  source 1..24: mol_type = other DNA
ggattcacctttgctgattatacc

SEQ ID NO: 1228 - protein, 8 aa, synthetic construct
  REGION 1..8: note = synthetic
GFTFADYT

SEQ ID NO: 1229 - DNA, 24 bp, synthetic construct
  misc_feature 1..24: note = synthetic
  source 1..24: mol_type = other DNA
attagttggaatagtggtagcaaa

SEQ ID NO: 1230 - protein, 8 aa, synthetic construct
  REGION 1..8: note = synthetic
ISWNSGSK

SEQ ID NO: 1231 - DNA, 51 bp, synthetic construct
  misc_feature 1..51: note = synthetic
  source 1..51: mol_type = other DNA
gcaaaatatggaagtggctacgggagatatttcttctacgctatggacgtc

SEQ ID NO: 1232 - protein, 17 aa, synthetic construct
  REGION 1..17: note = synthetic
AKYGSGYGRYFFYAMDV

SEQ ID NO: 1233 - DNA, 372 bp, synthetic construct
  misc_feature 1..372: note = synthetic
  source 1..372: mol_type = other DNA
gaggtgcagctggtggagtcaaggggagccttggtacagcctggcaggtccctgagactctcctgtgcagcctctggattcgcctttaatgattataccatgcactgggtccggcaagctccagggaagggcctggagtgggtctcagatattagttggaatagtaatagtaaagactatgcggactctgtgaagggccgattcaccatctccagagacaatgccaagaactccctctatctacaaatgaacagtctgagagctgaggacacggccttgtattactgtgtaaaagatggaagtggctacgggaaattttccctctacgctttggacgtctggggccaagggaccacggtcaccgtctcctca

SEQ ID NO: 1234 - protein, 124 aa, synthetic construct
  REGION 1..124: note = synthetic
EVQLVESRGALVQPGRSLRLSCAASGFAFNDYTMHWVRQAPGKGLEWVSDISWNSNSKDYADSVKGRFTISRDNAKNSLYLQMNSLRAEDTALYYCVKDGSGYGKFSLYALDVWGQGTTVTVSS

SEQ ID NO: 1235 - DNA, 24 bp, synthetic construct
  misc_feature 1..24: note = synthetic
  source 1..24: mol_type = other DNA
ggattcgcctttaatgattatacc

SEQ ID NO: 1236 - protein, 8 aa, synthetic construct
  REGION 1..8: note = synthetic
GFAFNDYT

SEQ ID NO: 1237 - DNA, 24 bp, synthetic construct
  misc_feature 1..24: note = synthetic
  source 1..24: mol_type = other DNA
attagttggaatagtaatagtaaa

SEQ ID NO: 1238 - protein, 8 aa, synthetic construct
  REGION 1..8: note = synthetic
ISWNSNSK

SEQ ID NO: 1239 - DNA, 51 bp, synthetic construct
  misc_feature 1..51: note = synthetic
  source 1..51: mol_type = other DNA
gtaaaagatggaagtggctacgggaaattttccctctacgctttggacgtc

SEQ ID NO: 1240 - protein, 17 aa, synthetic construct
  REGION 1..17: note = synthetic
VKDGSGYGKFSLYALDV

SEQ ID NO: 1241 - DNA, 372 bp, synthetic construct
  misc_feature 1..372: note = synthetic
  source 1..372: mol_type = other DNA
caggtgcagctggtggagtctgggggaggcttggttcaccctggcaggtccctgagactctcctgtgcagcctctggattcaaatttgatgattataccatgcactgggtccggcaagctccagggaagggcctagagtgggtctcagatattagttggaatagtggtagtaaaggctatgcggactctgtgaagggccgattcaccatctccagagacaacgccaaggattccctatatctgcagatggacagtctgagagctgcagacacggccttctattactgtgcaaaagataaaagtggctacggccacttctactactacgctatggacgtctggggccaagggaccacggtcaccgtctcctca

SEQ ID NO: 1242 - protein, 124 aa, synthetic construct
  REGION 1..124: note = synthetic
QVQLVESGGGLVHPGRSLRLSCAASGFKFDDYTMHWVRQAPGKGLEWVSDISWNSGSKGYADSVKGRFTISRDNAKDSLYLQMDSLRAADTAFYYCAKDKSGYGHFYYYAMDVWGQGTTVTVSS

SEQ ID NO: 1243 - DNA, 24 bp, synthetic construct
  misc_feature 1..24: note = synthetic
  source 1..24: mol_type = other DNA
ggattcaaatttgatgattatacc

SEQ ID NO: 1244 - protein, 8 aa, synthetic construct
  REGION 1..8: note = synthetic
GFKFDDYT

SEQ ID NO: 1245 - DNA, 24 bp, synthetic construct
  misc_feature 1..24: note = synthetic
  source 1..24: mol_type = other DNA
attagttggaatagtggtagtaaa

SEQ ID NO: 1246 - protein, 8 aa, synthetic construct
  REGION 1..8: note = synthetic
ISWNSGSK

SEQ ID NO: 1247 - DNA, 51 bp, synthetic construct
  misc_feature 1..51: note = synthetic
  source 1..51: mol_type = other DNA
gcaaaagataaaagtggctacggccacttctactactacgctatggacgtc

SEQ ID NO: 1248 - protein, 17 aa, synthetic construct
  REGION 1..17: note = synthetic
AKDKSGYGHFYYYAMDV

SEQ ID NO: 1249 - DNA, 372 bp, synthetic construct
  misc_feature 1..372: note = synthetic
  source 1..372: mol_type = other DNA
gaggtgcagctggtggagtctgggggaggcttggtacaccctggcaggtccctaagactctcctgtacagcctctggattcaagtttgctgattataccatgcactgggtccggcaagctccagggaagggcctggagtgggtctcagatattagttggaatagtggtagtaaaggctatgcggactctgtaaagggccgattcaccatctccagagacaatgacaagaactccctgtatctgcaaatgaacagtctgagaggtgaggacacggccttgtattactgtgcaaaagatggaagtggctacgggaggttccacttctacgctatcgacgtctggggccaagggaccacggtcaccgtctcctca

SEQ ID NO: 1250 - protein, 124 aa, synthetic construct
  REGION 1..124: note = synthetic
EVQLVESGGGLVHPGRSLRLSCTASGFKFADYTMHWVRQAPGKGLEWVSDISWNSGSKGYADSVKGRFTISRDNDKNSLYLQMNSLRGEDTALYYCAKDGSGYGRFHFYAIDVWGQGTTVTVSS

SEQ ID NO: 1251 - DNA, 24 bp, synthetic construct
  misc_feature 1..24: note = synthetic
  source 1..24: mol_type = other DNA
ggattcaagtttgctgattatacc

SEQ ID NO: 1252 - protein, 8 aa, synthetic construct
  REGION 1..8: note = synthetic
GFKFADYT

SEQ ID NO: 1253 - DNA, 24 bp, synthetic construct
  misc_feature 1..24: note = synthetic
  source 1..24: mol_type = other DNA
attagttggaatagtggtagtaaa

SEQ ID NO: 1254 - protein, 8 aa, synthetic construct
  REGION 1..8: note = synthetic
ISWNSGSK

SEQ ID NO: 1255 - DNA, 51 bp, synthetic construct
  misc_feature 1..51: note = synthetic
  source 1..51: mol_type = other DNA
gcaaaagatggaagtggctacgggaggttccacttctacgctatcgacgtc

SEQ ID NO: 1256 - protein, 17 aa, synthetic construct
  REGION 1..17: note = synthetic
AKDGSGYGRFHFYAIDV

SEQ ID NO: 1257 - DNA, 372 bp, synthetic construct
  misc_feature 1..372: note = synthetic
  source 1..372: mol_type = other DNA
gaggtgcagctggtggagtctgggggaggcttggtacagcctggcaggtccctgagactctcctgtgtagcctctggattcacctttgatgattattccatgcactgggtccggcaagctccagggaagggcctggagtgggtctcaggtattagttggaatagtggtagcaaagactatgcggactctgtgaagggccgattcaccatctccagagacaacgccaagaactccctgtatctgcaaatgaacagtctgagagctgaagacacggccttgtattactgtgcaaaatatggaagtggctacgggaagttctaccactacggtttggacgtctggggccaagggaccacggtcaccgtctcctca

SEQ ID NO: 1258 - protein, 124 aa, synthetic construct
  REGION 1..124: note = synthetic
EVQLVESGGGLVQPGRSLRLSCVASGFTFDDYSMHWVRQAPGKGLEWVSGISWNSGSKDYADSVKGRFTISRDNAKNSLYLQMNSLRAEDTALYYCAKYGSGYGKFYHYGLDVWGQGTTVTVSS

SEQ ID NO: 1259 - DNA, 24 bp, synthetic construct
  misc_feature 1..24: note = synthetic
  source 1..24: mol_type = other DNA
ggattcacctttgatgattattcc

SEQ ID NO: 1260 - protein, 8 aa, synthetic construct
  REGION 1..8: note = synthetic
GFTFDDYS

SEQ ID NO: 1261 - DNA, 24 bp, synthetic construct
  misc_feature 1..24: note = synthetic
  source 1..24: mol_type = other DNA
attagttggaatagtggtagcaaa

SEQ ID NO: 1262 - protein, 8 aa, synthetic construct
  REGION 1..8: note = synthetic
ISWNSGSK

SEQ ID NO: 1263 - DNA, 51 bp, synthetic construct
  misc_feature 1..51: note = synthetic
  source 1..51: mol_type = other DNA
gcaaaatatggaagtggctacgggaagttctaccactacggtttggacgtc

SEQ ID NO: 1264 - protein, 17 aa, synthetic construct
  REGION 1..17: note = synthetic
AKYGSGYGKFYHYGLDV

SEQ ID NO: 1265 - DNA, 372 bp, synthetic construct
  misc_feature 1..372: note = synthetic
  source 1..372: mol_type = other DNA
caggtgcagttggtggagtctgggggaggcttggtacagcctggcaggtccctgagactctcctgtgcagcctctggattcacctttgctgattataccatgcactgggtccggcaggctccagggaagggcctggagtgggtctcagatattagttggaatagtggtagcatgggctatgcggactctgtgaagggccgattcaccatctccagagacaacgccaagaaatccctgtatctgcaaatgaacagtctgagaactgaggacacggccttgtattactgtgcaaaagatggaagtggctacgggaaatacttcttctacgctatggacgtctggggccaagggaccacggtcaccgtctcctca

SEQ ID NO: 1266 - protein, 124 aa, synthetic construct
  REGION 1..124: note = synthetic
QVQLVESGGGLVQPGRSLRLSCAASGFTFADYTMHWVRQAPGKGLEWVSDISWNSGSMGYADSVKGRFTISRDNAKKSLYLQMNSLRTEDTALYYCAKDGSGYGKYFFYAMDVWGQGTTVTVSS

SEQ ID NO: 1267 - DNA, 24 bp, synthetic construct
  misc_feature 1..24: note = synthetic
  source 1..24: mol_type = other DNA
ggattcacctttgctgattatacc

SEQ ID NO: 1268 - protein, 8 aa, synthetic construct
  REGION 1..8: note = synthetic
GFTFADYT

SEQ ID NO: 1269 - DNA, 24 bp, synthetic construct
  misc_feature 1..24: note = synthetic
  source 1..24: mol_type = other DNA
attagttggaatagtggtagcatg

SEQ ID NO: 1270 - protein, 8 aa, synthetic construct
  REGION 1..8: note = synthetic
ISWNSGSM

SEQ ID NO: 1271 - DNA, 51 bp, synthetic construct
  misc_feature 1..51: note = synthetic
  source 1..51: mol_type = other DNA
gcaaaagatggaagtggctacgggaaatacttcttctacgctatggacgtc

SEQ ID NO: 1272 - protein, 17 aa, synthetic construct
  REGION 1..17: note = synthetic
AKDGSGYGKYFFYAMDV

SEQ ID NO: 1273 - DNA, 372 bp, synthetic construct
  misc_feature 1..372: note = synthetic
  source 1..372: mol_type = other DNA
gaggtgcagctggtgcagtctgggggaggcttggtacagcctggcaggtccctgagactctcctgtgcagcctctggattcaccttttctgattatactatgcattgggtccggcaaggtccagggaagggcctggagtgggtctcagatattagttggaatagtggtagtaaaggctatacggactctgtgaagggccgattcaccatttccagagacaacgccaagaagtccctgtatctacaaatgaacagtctgagagctgaggacacggccttgtactactgtgtaaaagatggaagtggctacgggaaataccacttctacgctatggacgtctggggccaagggaccctggtcaccgtctcctca

SEQ ID NO: 1274 - protein, 124 aa, synthetic construct
  REGION 1..124: note = synthetic
EVQLVQSGGGLVQPGRSLRLSCAASGFTFSDYTMHWVRQGPGKGLEWVSDISWNSGSKGYTDSVKGRFTISRDNAKKSLYLQMNSLRAEDTALYYCVKDGSGYGKYHFYAMDVWGQGTLVTVSS

SEQ ID NO: 1275 - DNA, 24 bp, synthetic construct
  misc_feature 1..24: note = synthetic
  source 1..24: mol_type = other DNA
ggattcaccttttctgattatact

SEQ ID NO: 1276 - protein, 8 aa, synthetic construct
  REGION 1..8: note = synthetic
GFTFSDYT

SEQ ID NO: 1277 - DNA, 24 bp, synthetic construct
  misc_feature 1..24: note = synthetic
  source 1..24: mol_type = other DNA
attagttggaatagtggtagtaaa

SEQ ID NO: 1278 - protein, 8 aa, synthetic construct
  REGION 1..8: note = synthetic
ISWNSGSK

SEQ ID NO: 1279 - DNA, 51 bp, synthetic construct
  misc_feature 1..51: note = synthetic
  source 1..51: mol_type = other DNA
gtaaaagatggaagtggctacgggaaataccacttctacgctatggacgtc

SEQ ID NO: 1280 - protein, 17 aa, synthetic construct
  REGION 1..17: note = synthetic
VKDGSGYGKYHFYAMDV

SEQ ID NO: 1281 - DNA, 372 bp, synthetic construct
  misc_feature 1..372: note = synthetic
  source 1..372: mol_type = other DNA
gaggtgcagctggtggagtcggggggaggcttggttcaccctggcaggtccctgagactctcctgtgcagcctctggattcacctttgatgattataccatgcactgggtccggcaagctccagggaagggcctggaatgggtctcagatattagttggaatagtggtagcagaggctatgcggactctgtgaagggccgattcaccatctccagagataatgccgagaactccctgtacctgcaaatgaacagtctgagagctgaggacacggccttgtattactgtgcaaaagataaaagtggctacggccactactactactacgctatggacgtctggggccaagggaccacggtcaccgtctcctca

SEQ ID NO: 1282 - protein, 124 aa, synthetic construct
  REGION 1..124: note = synthetic
EVQLVESGGGLVHPGRSLRLSCAASGFTFDDYTMHWVRQAPGKGLEWVSDISWNSGSRGYADSVKGRFTISRDNAENSLYLQMNSLRAEDTALYYCAKDKSGYGHYYYYAMDVWGQGTTVTVSS

SEQ ID NO: 1283 - DNA, 24 bp, synthetic construct
  misc_feature 1..24: note = synthetic
  source 1..24: mol_type = other DNA
ggattcacctttgatgattatacc

SEQ ID NO: 1284 - protein, 8 aa, synthetic construct
  REGION 1..8: note = synthetic
GFTFDDYT

SEQ ID NO: 1285 - DNA, 24 bp, synthetic construct
  misc_feature 1..24: note = synthetic
  source 1..24: mol_type = other DNA
attagttggaatagtggtagcaga

SEQ ID NO: 1286 - protein, 8 aa, synthetic construct
  REGION 1..8: note = synthetic
ISWNSGSR

SEQ ID NO: 1287 - DNA, 51 bp, synthetic construct
  misc_feature 1..51: note = synthetic
  source 1..51: mol_type = other DNA
gcaaaagataaaagtggctacggccactactactactacgctatggacgtc

SEQ ID NO: 1288 - protein, 17 aa, synthetic construct
  REGION 1..17: note = synthetic
AKDKSGYGHYYYYAMDV

SEQ ID NO: 1289 - DNA, 372 bp, synthetic construct
  misc_feature 1..372: note = synthetic
  source 1..372: mol_type = other DNA
gaggtgcagctggtggagtctgggggaggcttggtacagcctggcgggtccctgagactctcctgtgaagcctctggattcacctttgctgattataccttgcactgggtccggcaagctccagggaagggcctggaatgggtctcagatattagttggaatagtggcaccagaggctatgcggactctgtgaggggccgattcaccatctccagagacaacgccaagaagtccctgtatctgcaaatgaacagtctgagatctgaggacacggccttgtattactgtgtgaaagatggaagtggctacgggagatataatttctacgctatggacgtctggggccaagggaccacggtcaccgtctcctca

SEQ ID NO: 1290 - protein, 124 aa, synthetic construct
  REGION 1..124: note = synthetic
EVQLVESGGGLVQPGGSLRLSCEASGFTFADYTLHWVRQAPGKGLEWVSDISWNSGTRGYADSVRGRFTISRDNAKKSLYLQMNSLRSEDTALYYCVKDGSGYGRYNFYAMDVWGQGTTVTVSS

SEQ ID NO: 1291 - DNA, 24 bp, synthetic construct
  misc_feature 1..24: note = synthetic
  source 1..24: mol_type = other DNA
ggattcacctttgctgattatacc

SEQ ID NO: 1292 - protein, 8 aa, synthetic construct
  REGION 1..8: note = synthetic
GFTFADYT

SEQ ID NO: 1293 - DNA, 24 bp, synthetic construct
  misc_feature 1..24: note = synthetic
  source 1..24: mol_type = other DNA
attagttggaatagtggcaccaga

SEQ ID NO: 1294 - protein, 8 aa, synthetic construct
  REGION 1..8: note = synthetic
ISWNSGTR

SEQ ID NO: 1295 - DNA, 51 bp, synthetic construct
  misc_feature 1..51: note = synthetic
  source 1..51: mol_type = other DNA
gtgaaagatggaagtggctacgggagatataatttctacgctatggacgtc

SEQ ID NO: 1296 - protein, 17 aa, synthetic construct
  REGION 1..17: note = synthetic
VKDGSGYGRYNFYAMDV

SEQ ID NO: 1297 - DNA, 369 bp, synthetic construct
  misc_feature 1..369: note = synthetic
  source 1..369: mol_type = other DNA
gaggtgcagctggtggagtctgggggaggcttggttcagcctggcaggtccctgagactctcctgtgcagcctctggatttacctttgctgactataccatgcactgggtccggcaaggtccagggaagggcctggagtgggtctcagatattggttggaatagtaatactataggctatgcggactctgtgaagggccgattcgccatctccagagacaacgccaagaactccctgtatcttcaaatgaacagtctgcgacctgaggacacggccttatattactgtgtaaaggataaaagtggctacgggaaattccaatacggtttggacgtctggggccaagggaccacggtcaccgtctcctca

SEQ ID NO: 1298 - protein, 123 aa, synthetic construct
  REGION 1..123: note = synthetic
EVQLVESGGGLVQPGRSLRLSCAASGFTFADYTMHWVRQGPGKGLEWVSDIGWNSNTIGYADSVKGRFAISRDNAKNSLYLQMNSLRPEDTALYYCVKDKSGYGKFQYGLDVWGQGTTVTVSS

SEQ ID NO: 1299 - DNA, 24 bp, synthetic construct
  misc_feature 1..24: note = synthetic
  source 1..24: mol_type = other DNA
ggatttacctttgctgactatacc

SEQ ID NO: 1300 - protein, 8 aa, synthetic construct
  REGION 1..8: note = synthetic
GFTFADYT

SEQ ID NO: 1301 - DNA, 24 bp, synthetic construct
  misc_feature 1..24: note = synthetic
  source 1..24: mol_type = other DNA
attggttggaatagtaatactata

SEQ ID NO: 1302 - protein, 8 aa, synthetic construct
  REGION 1..8: note = synthetic
IGWNSNTI

SEQ ID NO: 1303 - DNA, 48 bp, synthetic construct
  misc_feature 1..48: note = synthetic
  source 1..48: mol_type = other DNA
gtaaaggataaaagtggctacgggaaattccaatacggtttggacgtc

SEQ ID NO: 1304 - protein, 16 aa, synthetic construct
  REGION 1..16: note = synthetic
VKDKSGYGKFQYGLDV

SEQ ID NO: 1305 - DNA, 369 bp, synthetic construct
  misc_feature 1..369: note = synthetic
  source 1..369: mol_type = other DNA
gaggtgcagctggtggagtctgggggaggcttggtacagcctggcaggtccctgagactctcctgtgcagcctctggatttacatttgacgattataccatgcactgggtccggcaaggtccagggaagggcctggagtgggtctcagatattggttggaatagtaacagtataggctatgcggactctgtgaagggccgattcaccatctccagagacaacgccaagaactccctgtatctccaaatgaacagtctgagacctgaggacacggccttgtatttctgtgtaaaggataaaagtggctacgggaaatttttcatcggtttggacgtctggggccaagggacaatggtcaccgtctcttca

SEQ ID NO: 1306 - protein, 123 aa, synthetic construct
  REGION 1..123: note = synthetic
EVQLVESGGGLVQPGRSLRLSCAASGFTFDDYTMHWVRQGPGKGLEWVSDIGWNSNSIGYADSVKGRFTISRDNAKNSLYLQMNSLRPEDTALYFCVKDKSGYGKFFIGLDVWGQGTMVTVSS

SEQ ID NO: 1307 - DNA, 24 bp, synthetic construct
  misc_feature 1..24: note = synthetic
  source 1..24: mol_type = other DNA
ggatttacatttgacgattatacc

SEQ ID NO: 1308 - protein, 8 aa, synthetic construct
  REGION 1..8: note = synthetic
GFTFDDYT

SEQ ID NO: 1309 - DNA, 24 bp, synthetic construct
  misc_feature 1..24: note = synthetic
  source 1..24: mol_type = other DNA
attggttggaatagtaacagtata

SEQ ID NO: 1310 - protein, 8 aa, synthetic construct
  REGION 1..8: note = synthetic
IGWNSNSI

SEQ ID NO: 1311 - DNA, 48 bp, synthetic construct
  misc_feature 1..48: note = synthetic
  source 1..48: mol_type = other DNA
gtaaaggataaaagtggctacgggaaatttttcatcggtttggacgtc

SEQ ID NO: 1312 - protein, 16 aa, synthetic construct
  REGION 1..16: note = synthetic
VKDKSGYGKFFIGLDV

SEQ ID NO: 1313 - DNA, 369 bp, synthetic construct
  misc_feature 1..369: note = synthetic
  source 1..369: mol_type = other DNA
caggtgcagttggtggagtctgggggaggcttggtacagcctggcaggtccctgagactctcctgtgcagcctctggatttacatttgacgattataccatgcactgggtccggcaaggtccagggaagggcctggagtgggtctcagatattggttggaatagtaatactaaaggctatgcggactctgtgaagggccgattcaccatctccagagacaacgccaagaattccctgtatctccaaatgaacagtctgagacctgaggacacggccttgtatttctgtgtgaaggataaaagtggctacgggaaatttttcatcggtttggacgtctggggccaagggacaatggtcaccgtctcttca

SEQ ID NO: 1314 - protein, 123 aa, synthetic construct
  REGION 1..123: note = synthetic
QVQLVESGGGLVQPGRSLRLSCAASGFTFDDYTMHWVRQGPGKGLEWVSDIGWNSNTKGYADSVKGRFTISRDNAKNSLYLQMNSLRPEDTALYFCVKDKSGYGKFFIGLDVWGQGTMVTVSS

SEQ ID NO: 1315 - DNA, 24 bp, synthetic construct
  misc_feature 1..24: note = synthetic
  source 1..24: mol_type = other DNA
ggatttacatttgacgattatacc

SEQ ID NO: 1316 - protein, 8 aa, synthetic construct
  REGION 1..8: note = synthetic
GFTFDDYT

SEQ ID NO: 1317 - DNA, 24 bp, synthetic construct
  misc_feature 1..24: note = synthetic
  source 1..24: mol_type = other DNA
attggttggaatagtaatactaaa

SEQ ID NO: 1318 - protein, 8 aa, synthetic construct
  REGION 1..8: note = synthetic
IGWNSNTK

SEQ ID NO: 1319 - DNA, 48 bp, synthetic construct
  misc_feature 1..48: note = synthetic
  source 1..48: mol_type = other DNA
gtgaaggataaaagtggctacgggaaatttttcatcggtttggacgtc

SEQ ID NO: 1320 - protein, 16 aa, synthetic construct
  REGION 1..16: note = synthetic
VKDKSGYGKFFIGLDV

SEQ ID NO: 1321 - DNA, 369 bp, synthetic construct
  misc_feature 1..369: note = synthetic
  source 1..369: mol_type = other DNA
gaggtgcagctggtggagtctgggggaggcttggtccagcctgggcggtccctgagactctcctgtgcagcctccggattcacctttgctgattataccatgcactgggtccggcaaggtccagggacgggcctggagtgggtctcagatattggttggagtggtggtagtttaggctatgcggactctgtgaagggccgattcaccatctccagagacaacgccaagaactccctgtatttggaaatgaacaatctgcgacctgaagacacggccttgtattattgtgtaaaggataaaagtggctacgggaaattccagtacggtttggacgtctggggccaagggaccacggtcaccgtctcctca

SEQ ID NO: 1322 - protein, 123 aa, synthetic construct
  REGION 1..123: note = synthetic
EVQLVESGGGLVQPGRSLRLSCAASGFTFADYTMHWVRQGPGTGLEWVSDIGWSGGSLGYADSVKGRFTISRDNAKNSLYLEMNNLRPEDTALYYCVKDKSGYGKFQYGLDVWGQGTTVTVSS

SEQ ID NO: 1323 - DNA, 24 bp, synthetic construct
  misc_feature 1..24: note = synthetic
  source 1..24: mol_type = other DNA
ggattcacctttgctgattatacc

SEQ ID NO: 1324 - protein, 8 aa, synthetic construct
  REGION 1..8: note = synthetic
GFTFADYT

SEQ ID NO: 1325 - DNA, 24 bp, synthetic construct
  misc_feature 1..24: note = synthetic
  source 1..24: mol_type = other DNA
attggttggagtggtggtagttta

SEQ ID NO: 1326 - protein, 8 aa, synthetic construct
  REGION 1..8: note = synthetic
IGWSGGSL

SEQ ID NO: 1327 - DNA, 48 bp, synthetic construct
  misc_feature 1..48: note = synthetic
  source 1..48: mol_type = other DNA
gtaaaggataaaagtggctacgggaaattccagtacggtttggacgtc

SEQ ID NO: 1328 - protein, 16 aa, synthetic construct
  REGION 1..16: note = synthetic
VKDKSGYGKFQYGLDV

SEQ ID NO: 1329 - DNA, 369 bp, synthetic construct
  misc_feature 1..369: note = synthetic
  source 1..369: mol_type = other DNA
gaggtgcagctggtggagtctgggggaggcgtggtacagcctggcaggtccctgagactctcctgtgcagcctctgggtttaaatttgatggttataccatgcactgggtccggcaaggtccagggaagggcctggagtgggtctcagatattggttggaatagtaacactataggctatgcggactctgtgaagggccgattcaccatctccagagacaacgccaagaactccctgtatctccaaatgaacagtctgagaccagaggacacggccttgtatttctgtgtaaaggataaaagtggctacgggaaatttttcatcggtttggacgtctggggccaagggacaatggtcaccgtctcttca

SEQ ID NO: 1330 - protein, 123 aa, synthetic construct
  REGION 1..123: note = synthetic
EVQLVESGGGVVQPGRSLRLSCAASGFKFDGYTMHWVRQGPGKGLEWVSDIGWNSNTIGYADSVKGRFTISRDNAKNSLYLQMNSLRPEDTALYFCVKDKSGYGKFFIGLDVWGQGTMVTVSS

SEQ ID NO: 1331 - DNA, 24 bp, synthetic construct
  misc_feature 1..24: note = synthetic
  source 1..24: mol_type = other DNA
gggtttaaatttgatggttatacc

SEQ ID NO: 1332 - protein, 8 aa, synthetic construct
  REGION 1..8: note = synthetic
GFKFDGYT

SEQ ID NO: 1333 - DNA, 24 bp, synthetic construct
  misc_feature 1..24: note = synthetic
  source 1..24: mol_type = other DNA
attggttggaatagtaacactata

SEQ ID NO: 1334 - protein, 8 aa, synthetic construct
  REGION 1..8: note = synthetic
IGWNSNTI

SEQ ID NO: 1335 - DNA, 48 bp, synthetic construct; identical to SEQ ID NO: 1311
  misc_feature 1..48: note = synthetic
  source 1..48: mol_type = other DNA

SEQ ID NO: 1336 - protein, 16 aa, synthetic construct
  REGION 1..16: note = synthetic
VKDKSGYGKFFIGLDV

SEQ ID NO: 1337 - DNA, 369 bp, synthetic construct
  misc_feature 1..369: note = synthetic
  source 1..369: mol_type = other DNA
caggtgcagctggtggagtctgggggaggcttggtacagcctggcaggtccctgagactctcctgtgcagcctctggattcacctttgatgattataccatgcactgggtccggcaaggtccagggaagggcctggagtgggtctcagatattggttggaatagtaatactataggctatgcggactctgtgaagggccgattcaccatctccagagacaacgccaggaactccctgtatctgcaaatgaacagtctgcgacctgaagacacggccttatattactgtgtaaaggataaaagtggctacgggaaattccaatacggtttggacgtctggggccaagggaccacggtcaccgtctcctca

SEQ ID NO: 1338 - protein, 123 aa, synthetic construct
  REGION 1..123: note = synthetic
QVQLVESGGGLVQPGRSLRLSCAASGFTFDDYTMHWVRQGPGKGLEWVSDIGWNSNTIGYADSVKGRFTISRDNARNSLYLQMNSLRPEDTALYYCVKDKSGYGKFQYGLDVWGQGTTVTVSS

SEQ ID NO: 1339 - DNA, 24 bp, synthetic construct
  misc_feature 1..24: note = synthetic
  source 1..24: mol_type = other DNA
ggattcacctttgatgattatacc

SEQ ID NO: 1340 - protein, 8 aa, synthetic construct
  REGION 1..8: note = synthetic
GFTFDDYT

SEQ ID NO: 1341 - DNA, 24 bp, synthetic construct
  misc_feature 1..24: note = synthetic
  source 1..24: mol_type = other DNA
attggttggaatagtaatactata

SEQ ID NO: 1342 - protein, 8 aa, synthetic construct
  REGION 1..8: note = synthetic
IGWNSNTI

SEQ ID NO: 1343 - DNA, 48 bp, synthetic construct; identical to SEQ ID NO: 1303
  misc_feature 1..48: note = synthetic
  source 1..48: mol_type = other DNA

SEQ ID NO: 1344 - protein, 16 aa, synthetic construct
  REGION 1..16: note = synthetic
VKDKSGYGKFQYGLDV

SEQ ID NO: 1345 - DNA, 369 bp, synthetic construct
  misc_feature 1..369: note = synthetic
  source 1..369: mol_type = other DNA
caggtgcaactggtggagtctgggggaggcttggtacagcctggcaggtccctgagactctcctgtgcagcctctggattcaagtttgatgattataccatgcactgggtccggcaaggtccagggaagggcctggagtgggtctcagacattagttggagtggtggtagcatagactatacggactctgtgaagggccgattctccatctccagagacaacgccaagaactccctgtatctgcaaatgaacagtctgagagttgaagacacggccttgtattattgtgtaaaagataaaagtggctacgggaagtactcttacggtttggacgtctggggccaagggaccacggtcaccgtctcctca

SEQ ID NO: 1346 - protein, 123 aa, synthetic construct
  REGION 1..123: note = synthetic
QVQLVESGGGLVQPGRSLRLSCAASGFKFDDYTMHWVRQGPGKGLEWVSDISWSGGSIDYTDSVKGRFSISRDNAKNSLYLQMNSLRVEDTALYYCVKDKSGYGKYSYGLDVWGQGTTVTVSS

SEQ ID NO: 1347 - DNA, 24 bp, synthetic construct
  misc_feature 1..24: note = synthetic
  source 1..24: mol_type = other DNA
ggattcaagtttgatgattatacc

SEQ ID NO: 1348 - protein, 8 aa, synthetic construct
  REGION 1..8: note = synthetic
GFKFDDYT

SEQ ID NO: 1349 - DNA, 24 bp, synthetic construct
  misc_feature 1..24: note = synthetic
  source 1..24: mol_type = other DNA
attagttggagtggtggtagcata

SEQ ID NO: 1350 - protein, 8 aa, synthetic construct
  REGION 1..8: note = synthetic
ISWSGGSI

SEQ ID NO: 1351 - DNA, 48 bp, synthetic construct
  misc_feature 1..48: note = synthetic
  source 1..48: mol_type = other DNA
gtaaaagataaaagtggctacgggaagtactcttacggtttggacgtc

SEQ ID NO: 1352 - protein, 16 aa, synthetic construct
  REGION 1..16: note = synthetic
VKDKSGYGKYSYGLDV

SEQ ID NO: 1353 - DNA, 357 bp, synthetic construct
  misc_feature 1..357: note = synthetic
  source 1..357: mol_type = other DNA
gaggtgcagctggtggagtctgggggaggcttggtaaagccgggggggtcccttagaatctcctgtgcagcctctggattctctttcattaacgcctggatgaactgggtccgccaggctccagggaaggggctggagtgggttggccgtattaaaagcataagtgatggtgggacaacagactacgctgcatccgtgaaaggcagattcaccatctcaagagaagattcaaaaaatatgctgtttctggaaatgaatagtctgaaaaccgaggacacagccgtgttttactgtaccacagaggtcgctagaactccgaactactggggccggggaaccctggtcaccgtctcctca

SEQ ID NO: 1354 - protein, 119 aa, synthetic construct
  REGION 1..119: note = synthetic
EVQLVESGGGLVKPGGSLRISCAASGFSFINAWMNWVRQAPGKGLEWVGRIKSISDGGTTDYAASVKGRFTISREDSKNMLFLEMNSLKTEDTAVFYCTTEVARTPNYWGRGTLVTVSS

SEQ ID NO: 1355 - DNA, 24 bp, synthetic construct
  misc_feature 1..24: note = synthetic
  source 1..24: mol_type = other DNA
ggattctctttcattaacgcctgg

SEQ ID NO: 1356 - protein, 8 aa, synthetic construct
  REGION 1..8: note = synthetic
GFSFINAW

SEQ ID NO: 1357 - DNA, 30 bp, synthetic construct
  misc_feature 1..30: note = synthetic
  source 1..30: mol_type = other DNA
attaaaagcataagtgatggtgggacaaca

SEQ ID NO: 1358 - protein, 10 aa, synthetic construct
  REGION 1..10: note = synthetic
IKSISDGGTT

SEQ ID NO: 1359 - DNA, 30 bp, synthetic construct
  misc_feature 1..30: note = synthetic
  source 1..30: mol_type = other DNA
accacagaggtcgctagaactccgaactac

SEQ ID NO: 1360 - protein, 10 aa, synthetic construct
  REGION 1..10: note = synthetic
TTEVARTPNY

SEQ ID NO: 1361 - DNA, 372 bp, synthetic construct
  misc_feature 1..372: note = synthetic
  source 1..372: mol_type = other DNA
gaagtacagcttgtagaatccggcggaggactggtacaacctggaagaagtcttagactgagttgcgcagctagtgggtttacattcgacgattacagcatgcattgggtgaggcaagctcctggtaaaggattggaatgggttagcgggatatcatggaactcaggaagcaagggatacgccgacagcgtgaaaggccgatttacaatatctagggacaacgcaaaaaactctctctaccttcaaatgaactctcttagggcagaagacacagcattgtattattgcgcaaaatacggcagtggttatggcaagttttatcattatggactggacgtgtggggacaagggacaacagtgacagtgagtagc

SEQ ID NO: 1362 - protein, 124 aa, synthetic construct
  REGION 1..124: note = synthetic
EVQLVESGGGLVQPGRSLRLSCAASGFTFDDYSMHWVRQAPGKGLEWVSGISWNSGSKGYADSVKGRFTISRDNAKNSLYLQMNSLRAEDTALYYCAKYGSGYGKFYHYGLDVWGQGTTVTVSS

SEQ ID NO: 1363 - DNA, 24 bp, synthetic construct
  misc_feature 1..24: note = synthetic
  source 1..24: mol_type = other DNA
gggtttacattcgacgattacagc

SEQ ID NO: 1364 - protein, 8 aa, synthetic construct
  REGION 1..8: note = synthetic
GFTFDDYS

SEQ ID NO: 1365 - DNA, 24 bp, synthetic construct
  misc_feature 1..24: note = synthetic
  source 1..24: mol_type = other DNA
atatcatggaactcaggaagcaag

SEQ ID NO: 1366 - protein, 8 aa, synthetic construct
  REGION 1..8: note = synthetic
ISWNSGSK

SEQ ID NO: 1367 - DNA, 51 bp, synthetic construct
  misc_feature 1..51: note = synthetic
  source 1..51: mol_type = other DNA
gcaaaatacggcagtggttatggcaagttttatcattatggactggacgtg

SEQ ID NO: 1368 - protein, 17 aa, synthetic construct
  REGION 1..17: note = synthetic
AKYGSGYGKFYHYGLDV

SEQ ID NO: 1369 - DNA, 372 bp, synthetic construct
  misc_feature 1..372: note = synthetic
  source 1..372: mol_type = other DNA
gaagtacaactggtcgaatctggaggaggtcttgttcaacctggtcgatcacttcgcctttcttgtgccgcttctggtttcactttcgacgattatagcatgcattgggtacgacaggctcccggaaaagggctggaatgggtgtcaggaattagttggaactcaggaagtattggatacgctgattcagtcaaaggacgcttcacaatctcaagggacaacgctaaaaactcactttatttgcaaatgaactctctccgcgctgaagataccgctctctattattgcgccaaagatgggtctggttacggttatttttactactatggaatggacgtttggggccaaggaacaactgtcacagtatcatcc

SEQ ID NO: 1370 - protein, 124 aa, synthetic construct
  REGION 1..124: note = synthetic
EVQLVESGGGLVQPGRSLRLSCAASGFTFDDYSMHWVRQAPGKGLEWVSGISWNSGSIGYADSVKGRFTISRDNAKNSLYLQMNSLRAEDTALYYCAKDGSGYGYFYYYGMDVWGQGTTVTVSS

SEQ ID NO: 1371 - DNA, 24 bp, synthetic construct
  misc_feature 1..24: note = synthetic
  source 1..24: mol_type = other DNA
ggtttcactttcgacgattatagc

SEQ ID NO: 1372 - protein, 8 aa, synthetic construct
  REGION 1..8: note = synthetic
GFTFDDYS

SEQ ID NO: 1373 - DNA, 24 bp, synthetic construct
  misc_feature 1..24: note = synthetic
  source 1..24: mol_type = other DNA
attagttggaactcaggaagtatt

SEQ ID NO: 1374 - protein, 8 aa, synthetic construct
  REGION 1..8: note = synthetic
ISWNSGSI

SEQ ID NO: 1375 - DNA, 51 bp, synthetic construct
  misc_feature 1..51: note = synthetic
  source 1..51: mol_type = other DNA
gccaaagatgggtctggttacggttatttttactactatggaatggacgtt

SEQ ID NO: 1376 - protein, 17 aa, synthetic construct
  REGION 1..17: note = synthetic
AKDGSGYGYFYYYGMDV

SEQ ID NO: 1377 - DNA, 372 bp, synthetic construct
  misc_feature 1..372: note = synthetic
  source 1..372: mol_type = other DNA
gaagtgcaactcgttgaaagcggaggaggactggtccagcccggcagatctctcagattgtcttgcgctgcatccggatttacatttgacgactattcaatgcactgggtacggcaagccccaggtaaaggactcgaatgggtaagcggcatatcttggaactcaggcagtattggctacgcagattcagtaaaaggaagattcactatttcaagggataatgctaagaacagtctctacttgcaaatgaatagcttgcgcgcagaagatacagcactttattattgtgcaaaagatggaagcggttatgggaaattttattattatggtatggatgtatggggtcaaggtacaacagttactgtgtcaagt

SEQ ID NO: 1378 - protein, 124 aa, synthetic construct
  REGION 1..124: note = synthetic
EVQLVESGGGLVQPGRSLRLSCAASGFTFDDYSMHWVRQAPGKGLEWVSGISWNSGSIGYADSVKGRFTISRDNAKNSLYLQMNSLRAEDTALYYCAKDGSGYGKFYYYGMDVWGQGTTVTVSS

SEQ ID NO: 1379 - DNA, 24 bp, synthetic construct
  misc_feature 1..24: note = synthetic
  source 1..24: mol_type = other DNA
ggatttacatttgacgactattca

SEQ ID NO: 1380 - protein, 8 aa, synthetic construct
  REGION 1..8: note = synthetic
GFTFDDYS

SEQ ID NO: 1381 - DNA, 24 bp, synthetic construct
  misc_feature 1..24: note = synthetic
  source 1..24: mol_type = other DNA
atatcttggaactcaggcagtatt

SEQ ID NO: 1382 - protein, 8 aa, synthetic construct
  REGION 1..8: note = synthetic
ISWNSGSI

SEQ ID NO: 1383 - DNA, 51 bp, synthetic construct
  misc_feature 1..51: note = synthetic
  source 1..51: mol_type = other DNA
gcaaaagatggaagcggttatgggaaattttattattatggtatggatgta

SEQ ID NO: 1384 - protein, 17 aa, synthetic construct
  REGION 1..17: note = synthetic
AKDGSGYGKFYYYGMDV

SEQ ID NO: 1385 - DNA, 324 bp, synthetic construct
  misc_feature 1..324: note = synthetic
  source 1..324: mol_type = other DNA
gacatccagatgacccagtctccatcctccctgtctgcatctgtaggagacagagtcaccatcacttgccgggcaagtcagagcattagcagctatttaaattggtatcagcagaaaccagggaaagcccctaagctcctgatctatgctgcatccagtttgcaaagtggggtcccgtcaaggttcagtggcagtggatctgggacagatttcactctcaccatcagcagtctgcaacctgaagattttgcaacttactactgtcaacagagttacagtacccctccgatcaccttcggccaagggacacgactggagattaaa

SEQ ID NO: 1386 - protein, 108 aa, synthetic construct; identical to SEQ ID NO: 610
  REGION 1..108: note = synthetic

SEQ ID NO: 1387 - DNA, 18 bp, synthetic construct
  misc_feature 1..18: note = synthetic
  source 1..18: mol_type = other DNA
cagagcattagcagctat

SEQ ID NO: 1388 - protein, 6 aa, synthetic construct
  REGION 1..6: note = synthetic
QSISSY

SEQ ID NO: 1389-1390 - skipped (2 entries)

SEQ ID NO: 1391 - DNA, 30 bp, synthetic construct; identical to SEQ ID NO: 199
  misc_feature 1..30: note = synthetic
  source 1..30: mol_type = other DNA

SEQ ID NO: 1392 - protein, 10 aa, synthetic construct
  REGION 1..10: note = synthetic
QQSYSTPPIT

SEQ ID NO: 1393 - DNA, 369 bp, synthetic construct; identical to SEQ ID NO: 265
  misc_feature 1..369: note = synthetic
  source 1..369: mol_type = other DNA

SEQ ID NO: 1394 - protein, 123 aa, synthetic construct; identical to SEQ ID NO: 266
  REGION 1..123: note = synthetic

SEQ ID NO: 1395 - DNA, 24 bp, synthetic construct
  misc_feature 1..24: note = synthetic
  source 1..24: mol_type = other DNA
ggattcacctttgatgattatacc

SEQ ID NO: 1396 - protein, 8 aa, synthetic construct
  REGION 1..8: note = synthetic
GFTFDDYT

SEQ ID NO: 1397 - DNA, 24 bp, synthetic construct
  misc_feature 1..24: note = synthetic
  source 1..24: mol_type = other DNA
attagttggaatagtggtagtata

SEQ ID NO: 1398 - protein, 8 aa, synthetic construct
  REGION 1..8: note = synthetic
ISWNSGSI

SEQ ID NO: 1399 - DNA, 48 bp, synthetic construct; identical to SEQ ID NO: 271
  misc_feature 1..48: note = synthetic
  source 1..48: mol_type = other DNA

SEQ ID NO: 1400 - protein, 16 aa, synthetic construct
  REGION 1..16: note = synthetic
AKDNSGYGHYYYGMDV

SEQ ID NO: 1401 - DNA, 320 bp, synthetic construct
  misc_feature 1..320: note = synthetic
  source 1..320: mol_type = other DNA
gaaatagtgatgacgcagtctccagccaccctgtctgtgtctccaggggaaagagccaccctctcctgcagggccagtcagagtgttagcagcaacttagcctggtaccagcaaaaacctggccaggctcccaggctcctcatctatggtgcatccaccagggccactggtatcccagccaggttcagtggcagtgggtctgggacagagttcactctcaccatcagcagcctgcagtctgaagattttgcagtttattactgtcagcactatattaactggcctctcactttcggcggagggaccaaggtggagatcaa

SEQ ID NO: 1402 - protein, 108 aa, synthetic construct
  REGION 1..108: note = synthetic
AEIVMTQSPATLSVSPGERATLSCRASQSVSSNLAWYQQKPGQAPRLLIYGASTRATGIPARFSGSGSGTEFTLTISSLQSEDFAVYYCQHYINWPLTFGGGTKVEIK

SEQ ID NO: 1403 - DNA, 18 bp, synthetic construct
  misc_feature 1..18: note = synthetic
  source 1..18: mol_type = other DNA
cagagtgttagcagcaac

SEQ ID NO: 1404 - protein, 6 aa, synthetic construct
  REGION 1..6: note = synthetic
QSVSSN

SEQ ID NO: 1405-1406 - skipped (2 entries)

SEQ ID NO: 1407 - DNA, 27 bp, synthetic construct
  misc_feature 1..27: note = synthetic
  source 1..27: mol_type = other DNA
cagcactatattaactggcctctcact

SEQ ID NO: 1408 - protein, 9 aa, synthetic construct
  REGION 1..9: note = synthetic
QHYINWPLT

SEQ ID NO: 1409 - DNA, 369 bp, synthetic construct; identical to SEQ ID NO: 153
  misc_feature 1..369: note = synthetic
  source 1..369: mol_type = other DNA

SEQ ID NO: 1410 - protein, 123 aa, synthetic construct; identical to SEQ ID NO: 154
  REGION 1..123: note = synthetic

SEQ ID NO: 1411 - DNA, 24 bp, synthetic construct
  misc_feature 1..24: note = synthetic
  source 1..24: mol_type = other DNA
ggattcacctttgatgattttacc

SEQ ID NO: 1412 - protein, 8 aa, synthetic construct
  REGION 1..8: note = synthetic
GFTFDDFT

SEQ ID NO: 1413 - DNA, 24 bp, synthetic construct
  misc_feature 1..24: note = synthetic
  source 1..24: mol_type = other DNA
atcagttggaatagtggtagcata

SEQ ID NO: 1414 - protein, 8 aa, synthetic construct
  REGION 1..8: note = synthetic
ISWNSGSI

SEQ ID NO: 1415 - DNA, 48 bp, synthetic construct; identical to SEQ ID NO: 159
  misc_feature 1..48: note = synthetic
  source 1..48: mol_type = other DNA

SEQ ID NO: 1416 - protein, 16 aa, synthetic construct
  REGION 1..16: note = synthetic
AKDNSGYGYYYYGMDV

SEQ ID NO: 1417 - DNA, 321 bp, synthetic construct; identical to SEQ ID NO: 161
  misc_feature 1..321: note = synthetic
  source 1..321: mol_type = other DNA

SEQ ID NO: 1418 - protein, 107 aa, synthetic construct; identical to SEQ ID NO: 162
  REGION 1..107: note = synthetic

SEQ ID NO: 1419 - DNA, 18 bp, synthetic construct
  misc_feature 1..18: note = synthetic
  source 1..18: mol_type = other DNA
cacagtgttagcaggaac

SEQ ID NO: 1420 - protein, 6 aa, synthetic construct
  REGION 1..6: note = synthetic
HSVSRN

SEQ ID NO: 1421-1422 - skipped (2 entries)

SEQ ID NO: 1423 - DNA, 27 bp, synthetic construct
  misc_feature 1..27: note = synthetic
  source 1..27: mol_type = other DNA
cagcagtataataattggcctctcact

SEQ ID NO: 1424 - protein, 9 aa, synthetic construct
  REGION 1..9: note = synthetic
QQYNNWPLT

SEQ ID NO: 1425 - DNA, 369 bp, synthetic construct; identical to SEQ ID NO: 265
  misc_feature 1..369: note = synthetic
  source 1..369: mol_type = other DNA

SEQ ID NO: 1426 - protein, 123 aa, synthetic construct; identical to SEQ ID NO: 266
  REGION 1..123: note = synthetic

SEQ ID NO: 1427 - DNA, 24 bp, synthetic construct
  misc_feature 1..24: note = synthetic
  source 1..24: mol_type = other DNA
ggattcacctttgatgattatacc

SEQ ID NO: 1428 - protein, 8 aa, synthetic construct
  REGION 1..8: note = synthetic
GFTFDDYT

SEQ ID NO: 1429 - DNA, 24 bp, synthetic construct
  misc_feature 1..24: note = synthetic
  source 1..24: mol_type = other DNA
attagttggaatagtggtagtata

SEQ ID NO: 1430 - protein, 8 aa, synthetic construct
  REGION 1..8: note = synthetic
ISWNSGSI

SEQ ID NO: 1431 - DNA, 48 bp, synthetic construct; identical to SEQ ID NO: 271
  misc_feature 1..48: note = synthetic
  source 1..48: mol_type = other DNA

SEQ ID NO: 1432 - protein, 16 aa, synthetic construct
  REGION 1..16: note = synthetic
AKDNSGYGHYYYGMDV

SEQ ID NO: 1433 - DNA, 321 bp, synthetic construct; identical to SEQ ID NO: 273
  misc_feature 1..321: note = synthetic
  source 1..321: mol_type = other DNA

SEQ ID NO: 1434 - protein, 107 aa, synthetic construct; identical to SEQ ID NO: 274
  REGION 1..107: note = synthetic

SEQ ID NO: 1435 - DNA, 18 bp, synthetic construct
  misc_feature 1..18: note = synthetic
  source 1..18: mol_type = other DNA
cagagtgttagcagcaac

SEQ ID NO: 1436 - protein, 6 aa, synthetic construct
  REGION 1..6: note = synthetic
QSVSSN

SEQ ID NO: 1437-1438 - skipped (2 entries)

SEQ ID NO: 1439 - DNA, 27 bp, synthetic construct
  misc_feature 1..27: note = synthetic
  source 1..27: mol_type = other DNA
cagcactatattaactggcctctcact

SEQ ID NO: 1440 - protein, 9 aa, synthetic construct
  REGION 1..9: note = synthetic
QHYINWPLT

SEQ ID NO: 1441 - DNA, 354 bp, synthetic construct; identical to SEQ ID NO: 329
  misc_feature 1..354: note = synthetic
  source 1..354: mol_type = other DNA

SEQ ID NO: 1442 - protein, 118 aa, synthetic construct; identical to SEQ ID NO: 330
  REGION 1..118: note = synthetic

SEQ ID NO: 1443 - DNA, 24 bp, synthetic construct
  misc_feature 1..24: note = synthetic
  source 1..24: mol_type = other DNA
ggatttaccttcagaagttatgcc

SEQ ID NO: 1444 - protein, 8 aa, synthetic construct
  REGION 1..8: note = synthetic
GFTFRSYA

SEQ ID NO: 1445 - DNA, 24 bp, synthetic construct
  misc_feature 1..24: note = synthetic
  source 1..24: mol_type = other DNA
gtatactatgatggaaataatcaa

SEQ ID NO: 1446 - protein, 8 aa, synthetic construct
  REGION 1..8: note = synthetic
VYYDGNNQ

SEQ ID NO: 1447 - DNA, 33 bp, synthetic construct; identical to SEQ ID NO: 303
  misc_feature 1..33: note = synthetic
  source 1..33: mol_type = other DNA

SEQ ID NO: 1448 - protein, 11 aa, synthetic construct
  REGION 1..11: note = synthetic
ARGPGYNWLDP

SEQ ID NO: 1449 - DNA, 321 bp, synthetic construct; identical to SEQ ID NO: 337
  misc_feature 1..321: note = synthetic
  source 1..321: mol_type = other DNA

SEQ ID NO: 1450 - protein, 107 aa, synthetic construct; identical to SEQ ID NO: 338
  REGION 1..107: note = synthetic

SEQ ID NO: 1451 - DNA, 18 bp, synthetic construct
  misc_feature 1..18: note = synthetic
  source 1..18: mol_type = other DNA
cagagtgttagcaggaac

SEQ ID NO: 1452 - protein, 6 aa, synthetic construct
  REGION 1..6: note = synthetic
QSVSRN

SEQ ID NO: 1453-1454 - skipped (2 entries)

SEQ ID NO: 1455 - DNA, 27 bp, synthetic construct
  misc_feature 1..27: note = synthetic
  source 1..27: mol_type = other DNA
cagcagtataataactggcctctcact

SEQ ID NO: 1456 - protein, 9 aa, synthetic construct
  REGION 1..9: note = synthetic
QQYNNWPLT

SEQ ID NO: 1457 - DNA, 354 bp, synthetic construct; identical to SEQ ID NO: 313
  misc_feature 1..354: note = synthetic
  source 1..354: mol_type = other DNA

SEQ ID NO: 1458 - protein, 118 aa, synthetic construct; identical to SEQ ID NO: 314
  REGION 1..118: note = synthetic

SEQ ID NO: 1459 - DNA, 24 bp, synthetic construct
  misc_feature 1..24: note = synthetic
  source 1..24: mol_type = other DNA
ggattcaccttcagaagttatggc

SEQ ID NO: 1460 - protein, 8 aa, synthetic construct
  REGION 1..8: note = synthetic
GFTFRSYG

SEQ ID NO: 1461 - DNA, 24 bp, synthetic construct
  misc_feature 1..24: note = synthetic
  source 1..24: mol_type = other DNA
atttactatgatggtaagaataaa

SEQ ID NO: 1462 - protein, 8 aa, synthetic construct
  REGION 1..8: note = synthetic
IYYDGKNK

SEQ ID NO: 1463 - DNA, 33 bp, synthetic construct; identical to SEQ ID NO: 319
  misc_feature 1..33: note = synthetic
  source 1..33: mol_type = other DNA

SEQ ID NO: 1464 - protein, 11 aa, synthetic construct
  REGION 1..11: note = synthetic
ARGPGYNWLDP

SEQ ID NO: 1465 - DNA, 321 bp, synthetic construct; identical to SEQ ID NO: 321
  misc_feature 1..321: note = synthetic
  source 1..321: mol_type = other DNA

SEQ ID NO: 1466 - protein, 107 aa, synthetic construct; identical to SEQ ID NO: 322
  REGION 1..107: note = synthetic

SEQ ID NO: 1467 - DNA, 18 bp, synthetic construct
  misc_feature 1..18: note = synthetic
  source 1..18: mol_type = other DNA
cagagaattagcagcaac

SEQ ID NO: 1468 - protein, 6 aa, synthetic construct
  REGION 1..6: note = synthetic
QRISSN

SEQ ID NO: 1469-1470 - skipped (2 entries)

SEQ ID NO: 1471 - DNA, 27 bp, synthetic construct
  misc_feature 1..27: note = synthetic
  source 1..27: mol_type = other DNA
cagcaacatcataactggcctctcact

SEQ ID NO: 1472 - protein, 9 aa, synthetic construct
  REGION 1..9: note = synthetic
QQHHNWPLT

SEQ ID NO: 1473 - protein, 119 aa, synthetic construct
  REGION 1..119: note = synthetic
DVQLVQSGAEVKKPGASVKVSCKASGYTFTRYTMHWVRQAPGQGLEWIGYINPSRGYTNYADSVKGRFTITTDKSTSTAYMELSSLRSEDTATYYCARYYDDHYCLDYWGQGTTVTVSS

SEQ ID NO: 1474 - protein, 8 aa, synthetic construct
  REGION 1..8: note = synthetic
GYTFTRYT

SEQ ID NO: 1475 - protein, 8 aa, synthetic construct
  REGION 1..8: note = synthetic
INPSRGYT

SEQ ID NO: 1476 - protein, 12 aa, synthetic construct
  REGION 1..12: note = synthetic
ARYYDDHYCLDY

SEQ ID NO: 1477 - protein, 106 aa, synthetic construct
  REGION 1..106: note = synthetic
DIVLTQSPATLSLSPGERATLSCRASQSVSYMNWYQQKPGKAPKRWIYDTSKVASGVPARFSGSGSGTDYSLTINSLEAEDAATYYCQQWSSNPLTFGGGTKVEIK

SEQ ID NO: 1478 - protein, 11 aa, synthetic construct
  REGION 1..11: note = synthetic
LSCRASQSVSY

SEQ ID NO: 1479 - skipped

SEQ ID NO: 1480 - protein, 9 aa, synthetic construct
  REGION 1..9: note = synthetic
QQWSSNPLT

SEQ ID NO: 1481 - DNA, 372 bp, synthetic construct; identical to SEQ ID NO: 1361
  misc_feature 1..372: note = synthetic
  source 1..372: mol_type = other DNA

SEQ ID NO: 1482 - protein, 124 aa, synthetic construct; identical to SEQ ID NO: 1362
  REGION 1..124: note = synthetic

SEQ ID NO: 1483 - DNA, 24 bp, synthetic construct
  misc_feature 1..24: note = synthetic
  source 1..24: mol_type = other DNA
gggtttacattcgacgattacagc

SEQ ID NO: 1484 - protein, 8 aa, synthetic construct
  REGION 1..8: note = synthetic
GFTFDDYS

SEQ ID NO: 1485 - DNA, 24 bp, synthetic construct
  misc_feature 1..24: note = synthetic
  source 1..24: mol_type = other DNA
atatcatggaactcaggaagcaag

SEQ ID NO: 1486 - protein, 8 aa, synthetic construct
  REGION 1..8: note = synthetic
ISWNSGSK

SEQ ID NO: 1487 - DNA, 51 bp, synthetic construct; identical to SEQ ID NO: 1367
  misc_feature 1..51: note = synthetic
  source 1..51: mol_type = other DNA

SEQ ID NO: 1488 - protein, 17 aa, synthetic construct
  REGION 1..17: note = synthetic
AKYGSGYGKFYHYGLDV

SEQ ID NO: 1489 - DNA, 372 bp, synthetic construct
  misc_feature 1..372: note = synthetic
  source 1..372: mol_type = other DNA
gaagtacagttggtagaatctggaggaggactcgtgcaaccaggacgatcattgcggttgagttgtgctgctagtggattcacattcgacgactatgctatgcattgggtaagacaggctccaggaaaaggactcgaatgggtgtcaggaataagttggaactccggaagcattgggtacgcagattcagtcaaagggcgattcaccatatcccgagataacgctaagaactcactttaccttcaaatgaactctcttcgagcagaggacactgcactttattattgcgctaaggacggctccggttatggatatttttattattatggaatggacgtatggggacaaggcactactgttaccgttagttcc

SEQ ID NO: 1490 - protein, 124 aa, synthetic construct
  REGION 1..124: note = synthetic
EVQLVESGGGLVQPGRSLRLSCAASGFTFDDYAMHWVRQAPGKGLEWVSGISWNSGSIGYADSVKGRFTISRDNAKNSLYLQMNSLRAEDTALYYCAKDGSGYGYFYYYGMDVWGQGTTVTVSS

SEQ ID NO: 1491 - DNA, 24 bp, synthetic construct
  misc_feature 1..24: note = synthetic
  source 1..24: mol_type = other DNA
ggattcacattcgacgactatgct

SEQ ID NO: 1492 - protein, 8 aa, synthetic construct
  REGION 1..8: note = synthetic
GFTFDDYA

SEQ ID NO: 1493 - DNA, 24 bp, synthetic construct
  misc_feature 1..24: note = synthetic
  source 1..24: mol_type = other DNA
ataagttggaactccggaagcatt

SEQ ID NO: 1494 - protein, 8 aa, synthetic construct
  REGION 1..8: note = synthetic
ISWNSGSI

SEQ ID NO: 1495 - DNA, 51 bp, synthetic construct
  misc_feature 1..51: note = synthetic
  source 1..51: mol_type = other DNA
gctaaggacggctccggttatggatatttttattattatggaatggacgta

SEQ ID NO: 1496 - protein, 17 aa, synthetic construct
  REGION 1..17: note = synthetic
AKDGSGYGYFYYYGMDV

SEQ ID NO: 1497 - DNA, 372 bp, synthetic construct; identical to SEQ ID NO: 1369
  misc_feature 1..372: note = synthetic
  source 1..372: mol_type = other DNA

SEQ ID NO: 1498 - protein, 124 aa, synthetic construct; identical to SEQ ID NO: 1370
  REGION 1..124: note = synthetic

SEQ ID NO: 1499 - DNA, 24 bp, synthetic construct
  misc_feature 1..24: note = synthetic
  source 1..24: mol_type = other DNA
ggtttcactttcgacgattatagc

SEQ ID NO: 1500 - protein, 8 aa, synthetic construct
  REGION 1..8: note = synthetic
GFTFDDYS

SEQ ID NO: 1501 - DNA, 24 bp, synthetic construct
  misc_feature 1..24: note = synthetic
  source 1..24: mol_type = other DNA
attagttggaactcaggaagtatt

SEQ ID NO: 1502 - protein, 8 aa, synthetic construct
  REGION 1..8: note = synthetic
ISWNSGSI

SEQ ID NO: 1503 - DNA, 51 bp, synthetic construct; identical to SEQ ID NO: 1375
  misc_feature 1..51: note = synthetic
  source 1..51: mol_type = other DNA

SEQ ID NO: 1504 - protein, 17 aa, synthetic construct
  REGION 1..17: note = synthetic
AKDGSGYGYFYYYGMDV

SEQ ID NO: 1505 - DNA, 372 bp, synthetic construct
  misc_feature 1..372: note = synthetic
  source 1..372: mol_type = other DNA
gaagttcaacttgtggaaagtggcggaggattggttcaaccaggacgttcattgaggctttcatgcgcagcttccggatttacatttgacgattacgcaatgcactgggttagacaggcaccaggaaaaggactggagtgggtgagcgggatttcatggaacagcggcagtatcggttatgcagactcagttaaaggaagattcaccatcagtagagacaacgcaaaaaattccctttatctccaaatgaactctcttagggccgaagatacagcattgtactactgcgcaaaagacggatcaggttacggaaaattttactactatggtatggatgtatggggtcagggaaccacagtaactgtatcaagc

SEQ ID NO: 1506 - protein, 124 aa, synthetic construct
  REGION 1..124: note = synthetic
EVQLVESGGGLVQPGRSLRLSCAASGFTFDDYAMHWVRQAPGKGLEWVSGISWNSGSIGYADSVKGRFTISRDNAKNSLYLQMNSLRAEDTALYYCAKDGSGYGKFYYYGMDVWGQGTTVTVSS

SEQ ID NO: 1507 - DNA, 24 bp, synthetic construct
  misc_feature 1..24: note = synthetic
  source 1..24: mol_type = other DNA
ggatttacatttgacgattacgca

SEQ ID NO: 1508 - protein, 8 aa, synthetic construct
  REGION 1..8: note = synthetic
GFTFDDYA

SEQ ID NO: 1509 - DNA, 24 bp, synthetic construct
  misc_feature 1..24: note = synthetic
  source 1..24: mol_type = other DNA
atttcatggaacagcggcagtatc

SEQ ID NO: 1510 - protein, 8 aa, synthetic construct
  REGION 1..8: note = synthetic
ISWNSGSI

SEQ ID NO: 1511 - DNA, 51 bp, synthetic construct
  misc_feature 1..51: note = synthetic
  source 1..51: mol_type = other DNA
gcaaaagacggatcaggttacggaaaattttactactatggtatggatgta

SEQ ID NO: 1512 - protein, 17 aa, synthetic construct
  REGION 1..17: note = synthetic
AKDGSGYGKFYYYGMDV

SEQ ID NO: 1513 - DNA, 372 bp, synthetic construct; identical to SEQ ID NO: 1377
  misc_feature 1..372: note = synthetic
  source 1..372: mol_type = other DNA

SEQ ID NO: 1514 - protein, 124 aa, synthetic construct; identical to SEQ ID NO: 1378
  REGION 1..124: note = synthetic

SEQ ID NO: 1515 - DNA, 24 bp, synthetic construct
  misc_feature 1..24: note = synthetic
  source 1..24: mol_type = other DNA
ggatttacatttgacgactattca

SEQ ID NO: 1516 - protein, 8 aa, synthetic construct
  REGION 1..8: note = synthetic
GFTFDDYS

SEQ ID NO: 1517 - DNA, 24 bp, synthetic construct
  misc_feature 1..24: note = synthetic
  source 1..24: mol_type = other DNA
atatcttggaactcaggcagtatt

SEQ ID NO: 1518 - protein, 8 aa, synthetic construct
  REGION 1..8: note = synthetic
ISWNSGSI

SEQ ID NO: 1519 - DNA, 51 bp, synthetic construct; identical to SEQ ID NO: 1383
  misc_feature 1..51: note = synthetic
  source 1..51: mol_type = other DNA

SEQ ID NO: 1520 - protein, 17 aa, synthetic construct
  REGION 1..17: note = synthetic
AKDGSGYGKFYYYGMDV

SEQ ID NO: 1521 - DNA, 372 bp, synthetic construct
  misc_feature 1..372: note = synthetic
  source 1..372: mol_type = other DNA
gaagtacagcttgtagaatccggcggaggactggtacaacctggaagaagtcttagactgagttgcgcagctagtgggtttacattcgacgattacagcatgcattgggtgaggcaagctcctggtaaaggattggaatgggttagcgggatatcatggaactcaggaagcatcggatacgccgacagcgtgaaaggccgatttacaatatctagggacaacgcaaaaaactctctctaccttcaaatgaactctcttagggcagaagacacagcattgtattattgcgcaaaatacggcagtggttatggcaagttttatcattatggactggacgtgtggggacaagggacaacagtgacagtgagtagc

SEQ ID NO: 1522 - protein, 124 aa, synthetic construct
  REGION 1..124: note = synthetic
EVQLVESGGGLVQPGRSLRLSCAASGFTFDDYSMHWVRQAPGKGLEWVSGISWNSGSIGYADSVKGRFTISRDNAKNSLYLQMNSLRAEDTALYYCAKYGSGYGKFYHYGLDVWGQGTTVTVSS

SEQ ID NO: 1523 - DNA, 24 bp, synthetic construct
  misc_feature 1..24: note = synthetic
  source 1..24: mol_type = other DNA
gggtttacattcgacgattacagc

SEQ ID NO: 1524 - protein, 8 aa, synthetic construct
  REGION 1..8: note = synthetic
GFTFDDYS

SEQ ID NO: 1525 - DNA, 24 bp, synthetic construct
  misc_feature 1..24: note = synthetic
  source 1..24: mol_type = other DNA
atatcatggaactcaggaagcatc

SEQ ID NO: 1526 - protein, 8 aa, synthetic construct
  REGION 1..8: note = synthetic
ISWNSGSI

SEQ ID NO: 1527 - DNA, 51 bp, synthetic construct; identical to SEQ ID NO: 1367
  misc_feature 1..51: note = synthetic
  source 1..51: mol_type = other DNA

SEQ ID NO: 1528 - protein, 17 aa, synthetic construct
  REGION 1..17: note = synthetic
AKYGSGYGKFYHYGLDV

SEQ ID NO: 1529 - DNA, 372 bp, synthetic construct
  misc_feature 1..372: note = synthetic
  source 1..372: mol_type = other DNA
gaagtacagcttgtagaatccggcggaggactggtacaacctggaagaagtcttagactgagttgcgcagctagtgggtttacattcgacgattacagcatgcattgggtgaggcaagctcctggtaaaggattggaatgggttagcgggatatcatggaactcaggaagcaagggatacgccgacagcgtgaaaggccgatttacaatatctagggacaacgcaaaaaactctctctaccttcaaatgaactctcttagggcagaagacacagcattgtattattgcgcaaaagacggcagtggttatggcaagttttatcattatggactggacgtgtggggacaagggacaacagtgacagtgagtagc

SEQ ID NO: 1530 - protein, 124 aa, synthetic construct
  REGION 1..124: note = synthetic
EVQLVESGGGLVQPGRSLRLSCAASGFTFDDYSMHWVRQAPGKGLEWVSGISWNSGSKGYADSVKGRFTISRDNAKNSLYLQMNSLRAEDTALYYCAKDGSGYGKFYHYGLDVWGQGTTVTVSS

SEQ ID NO: 1531 - DNA, 24 bp, synthetic construct
  misc_feature 1..24: note = synthetic
  source 1..24: mol_type = other DNA
gggtttacattcgacgattacagc

SEQ ID NO: 1532 - protein, 8 aa, synthetic construct
  REGION 1..8: note = synthetic
GFTFDDYS

SEQ ID NO: 1533 - DNA, 24 bp, synthetic construct
  misc_feature 1..24: note = synthetic
  source 1..24: mol_type = other DNA
atatcatggaactcaggaagcaag

SEQ ID NO: 1534 - protein, 8 aa, synthetic construct
  REGION 1..8: note = synthetic
ISWNSGSK

SEQ ID NO: 1535 - DNA, 51 bp, synthetic construct
  misc_feature 1..51: note = synthetic
  source 1..51: mol_type = other DNA
gcaaaagacggcagtggttatggcaagttttatcattatggactggacgtg

SEQ ID NO: 1536 - protein, 17 aa, synthetic construct
  REGION 1..17: note = synthetic
AKDGSGYGKFYHYGLDV

SEQ ID NO: 1537 - DNA, 372 bp, synthetic construct
  misc_feature 1..372: note = synthetic
  source 1..372: mol_type = other DNA
gaagtacagcttgtagaatccggcggaggactggtacaacctggaagaagtcttagactgagttgcgcagctagtgggtttacattcgacgattacagcatgcattgggtgaggcaagctcctggtaaaggattggaatgggttagcgggatatcatggaactcaggaagcaagggatacgccgacagcgtgaaaggccgatttacaatatctagggacaacgcaaaaaactctctctaccttcaaatgaactctcttagggcagaagacacagcattgtattattgcgcaaaatacggcagtggttatggcaagttttattattatggactggacgtgtggggacaagggacaacagtgacagtgagtagc

SEQ ID NO: 1538 - protein, 124 aa, synthetic construct
  REGION 1..124: note = synthetic
EVQLVESGGGLVQPGRSLRLSCAASGFTFDDYSMHWVRQAPGKGLEWVSGISWNSGSKGYADSVKGRFTISRDNAKNSLYLQMNSLRAEDTALYYCAKYGSGYGKFYYYGLDVWGQGTTVTVSS

SEQ ID NO: 1539 - DNA, 24 bp, synthetic construct
  misc_feature 1..24: note = synthetic
  source 1..24: mol_type = other DNA
gggtttacattcgacgattacagc

SEQ ID NO: 1540 - protein, 8 aa, synthetic construct
  REGION 1..8: note = synthetic
GFTFDDYS

SEQ ID NO: 1541 - DNA, 24 bp, synthetic construct
  misc_feature 1..24: note = synthetic
  source 1..24: mol_type = other DNA
atatcatggaactcaggaagcaag

SEQ ID NO: 1542 - protein, 8 aa, synthetic construct
  REGION 1..8: note = synthetic
ISWNSGSK

SEQ ID NO: 1543 - DNA, 51 bp, synthetic construct
  misc_feature 1..51: note = synthetic
  source 1..51: mol_type = other DNA
gcaaaatacggcagtggttatggcaagttttattattatggactggacgtg

SEQ ID NO: 1544 - protein, 17 aa, synthetic construct
  REGION 1..17: note = synthetic
AKYGSGYGKFYYYGLDV

SEQ ID NO: 1545 - DNA, 372 bp, synthetic construct
  misc_feature 1..372: note = synthetic
  source 1..372: mol_type = other DNA
gaagtacagcttgtagaatccggcggaggactggtacaacctggaagaagtcttagactgagttgcgcagctagtgggtttacattcgacgattacagcatgcattgggtgaggcaagctcctggtaaaggattggaatgggttagcgggatatcatggaactcaggaagcaagggatacgccgacagcgtgaaaggccgatttacaatatctagggacaacgcaaaaaactctctctaccttcaaatgaactctcttagggcagaagacacagcattgtattattgcgcaaaatacggcagtggttatggcaagttttatcattatggaatggacgtgtggggacaagggacaacagtgacagtgagtagc

SEQ ID NO: 1546 - protein, 124 aa, synthetic construct
  REGION 1..124: note = synthetic
EVQLVESGGGLVQPGRSLRLSCAASGFTFDDYSMHWVRQAPGKGLEWVSGISWNSGSKGYADSVKGRFTISRDNAKNSLYLQMNSLRAEDTALYYCAKYGSGYGKFYHYGMDVWGQGTTVTVSS

SEQ ID NO: 1547 - DNA, 24 bp, synthetic construct
  misc_feature 1..24: note = synthetic
  source 1..24: mol_type = other DNA
gggtttacattcgacgattacagc

SEQ ID NO: 1548 - protein, 8 aa, synthetic construct
  REGION 1..8: note = synthetic
GFTFDDYS

SEQ ID NO: 1549 - DNA, 24 bp, synthetic construct
  misc_feature 1..24: note = synthetic
  source 1..24: mol_type = other DNA
atatcatggaactcaggaagcaag

SEQ ID NO: 1550 - protein, 8 aa, synthetic construct
  REGION 1..8: note = synthetic
ISWNSGSK

SEQ ID NO: 1551 - DNA, 51 bp, synthetic construct
  misc_feature 1..51: note = synthetic
  source 1..51: mol_type = other DNA
gcaaaatacggcagtggttatggcaagttttatcattatggaatggacgtg

SEQ ID NO: 1552 - protein, 17 aa, synthetic construct
  REGION 1..17: note = synthetic
AKYGSGYGKFYHYGMDV

SEQ ID NO: 1553 - DNA, 372 bp, synthetic construct
  misc_feature 1..372: note = synthetic
  source 1..372: mol_type = other DNA
gaagtacagcttgtagaatccggcggaggactggtacaacctggaagaagtcttagactgagttgcgcagctagtgggtttacattcgacgattacagcatgcattgggtgaggcaagctcctggtaaaggattggaatgggttagcgggatatcatggaactcaggaagcatcggatacgccgacagcgtgaaaggccgatttacaatatctagggacaacgcaaaaaactctctctaccttcaaatgaactctcttagggcagaagacacagcattgtattattgcgcaaaagacggcagtggttatggcaagttttatcattatggactggacgtgtggggacaagggacaacagtgacagtgagtagc

SEQ ID NO: 1554 - protein, 124 aa, synthetic construct
  REGION 1..124: note = synthetic
EVQLVESGGGLVQPGRSLRLSCAASGFTFDDYSMHWVRQAPGKGLEWVSGISWNSGSIGYADSVKGRFTISRDNAKNSLYLQMNSLRAEDTALYYCAKDGSGYGKFYHYGLDVWGQGTTVTVSS

SEQ ID NO: 1555 - DNA, 24 bp, synthetic construct
  misc_feature 1..24: note = synthetic
  source 1..24: mol_type = other DNA
gggtttacattcgacgattacagc

SEQ ID NO: 1556 - protein, 8 aa, synthetic construct
  REGION 1..8: note = synthetic
GFTFDDYS

SEQ ID NO: 1557 - DNA, 24 bp, synthetic construct
  misc_feature 1..24: note = synthetic
  source 1..24: mol_type = other DNA
atatcatggaactcaggaagcatc

SEQ ID NO: 1558 - protein, 8 aa, synthetic construct
  REGION 1..8: note = synthetic
ISWNSGSI

SEQ ID NO: 1559 - DNA, 51 bp, synthetic construct; identical to SEQ ID NO: 1535
  misc_feature 1..51: note = synthetic
  source 1..51: mol_type = other DNA

SEQ ID NO: 1560 - protein, 17 aa, synthetic construct
  REGION 1..17: note = synthetic
AKDGSGYGKFYHYGLDV

SEQ ID NO: 1561 - DNA, 372 bp, synthetic construct
  misc_feature 1..372: note = synthetic
  source 1..372: mol_type = other DNA
gaagtacagcttgtagaatccggcggaggactggtacaacctggaagaagtcttagactgagttgcgcagctagtgggtttacattcgacgattacagcatgcattgggtgaggcaagctcctggtaaaggattggaatgggttagcgggatatcatggaactcaggaagcatcggatacgccgacagcgtgaaaggccgatttacaatatctagggacaacgcaaaaaactctctctaccttcaaatgaactctcttagggcagaagacacagcattgtattattgcgcaaaatacggcagtggttatggcaagttttattattatggactggacgtgtggggacaagggacaacagtgacagtgagtagc

SEQ ID NO: 1562 - protein, 124 aa, synthetic construct
  REGION 1..124: note = synthetic
EVQLVESGGGLVQPGRSLRLSCAASGFTFDDYSMHWVRQAPGKGLEWVSGISWNSGSIGYADSVKGRFTISRDNAKNSLYLQMNSLRAEDTALYYCAKYGSGYGKFYYYGLDVWGQGTTVTVSS

SEQ ID NO: 1563 - DNA, 24 bp, synthetic construct
  misc_feature 1..24: note = synthetic
  source 1..24: mol_type = other DNA
gggtttacattcgacgattacagc

SEQ ID NO: 1564 - protein, 8 aa, synthetic construct
  REGION 1..8: note = synthetic
GFTFDDYS

SEQ ID NO: 1565 - DNA, 24 bp, synthetic construct
  misc_feature 1..24: note = synthetic
  source 1..24: mol_type = other DNA
atatcatggaactcaggaagcatc

SEQ ID NO: 1566 - protein, 8 aa, synthetic construct
  REGION 1..8: note = synthetic
ISWNSGSI

SEQ ID NO: 1567 - DNA, 51 bp, synthetic construct; identical to SEQ ID NO: 1543
  misc_feature 1..51: note = synthetic
  source 1..51: mol_type = other DNA

SEQ ID NO: 1568 - protein, 17 aa, synthetic construct
  REGION 1..17: note = synthetic
AKYGSGYGKFYYYGLDV

SEQ ID NO: 1569 - DNA, 372 bp, synthetic construct
  misc_feature 1..372: note = synthetic
  source 1..372: mol_type = other DNA
gaagtacagcttgtagaatccggcggaggactggtacaacctggaagaagtcttagactgagttgcgcagctagtgggtttacattcgacgattacagcatgcattgggtgaggcaagctcctggtaaaggattggaatgggttagcgggatatcatggaactcaggaagcatcggatacgccgacagcgtgaaaggccgatttacaatatctagggacaacgcaaaaaactctctctaccttcaaatgaactctcttagggcagaagacacagcattgtattattgcgcaaaatacggcagtggttatggcaagttttatcattatggaatggacgtgtggggacaagggacaacagtgacagtgagtagc

SEQ ID NO: 1570 - protein, 124 aa, synthetic construct
  REGION 1..124: note = synthetic
EVQLVESGGGLVQPGRSLRLSCAASGFTFDDYSMHWVRQAPGKGLEWVSGISWNSGSIGYADSVKGRFTISRDNAKNSLYLQMNSLRAEDTALYYCAKYGSGYGKFYHYGMDVWGQGTTVTVSS

SEQ ID NO: 1571 - DNA, 24 bp, synthetic construct
  misc_feature 1..24: note = synthetic
  source 1..24: mol_type = other DNA
gggtttacattcgacgattacagc

SEQ ID NO: 1572 - protein, 8 aa, synthetic construct
  REGION 1..8: note = synthetic
GFTFDDYS

SEQ ID NO: 1573 - DNA, 24 bp, synthetic construct
  misc_feature 1..24: note = synthetic
  source 1..24: mol_type = other DNA
atatcatggaactcaggaagcatc

SEQ ID NO: 1574 - protein, 8 aa, synthetic construct
  REGION 1..8: note = synthetic
ISWNSGSI

SEQ ID NO: 1575 - DNA, 51 bp, synthetic construct; identical to SEQ ID NO: 1551
  misc_feature 1..51: note = synthetic
  source 1..51: mol_type = other DNA

SEQ ID NO: 1576 - protein, 17 aa, synthetic construct
  REGION 1..17: note = synthetic
AKYGSGYGKFYHYGMDV

SEQ ID NO: 1577 - DNA, 372 bp, synthetic construct
  misc_feature 1..372: note = synthetic
  source 1..372: mol_type = other DNA
gaagtacagcttgtagaatccggcggaggactggtacaacctggaagaagtcttagactgagttgcgcagctagtgggtttacattcgacgattacagcatgcattgggtgaggcaagctcctggtaaaggattggaatgggttagcgggatatcatggaactcaggaagcaagggatacgccgacagcgtgaaaggccgatttacaatatctagggacaacgcaaaaaactctctctaccttcaaatgaactctcttagggcagaagacacagcattgtattattgcgcaaaagacggcagtggttatggcaagttttattattatggactggacgtgtggggacaagggacaacagtgacagtgagtagc

SEQ ID NO: 1578 - protein, 124 aa, synthetic construct
  REGION 1..124: note = synthetic
EVQLVESGGGLVQPGRSLRLSCAASGFTFDDYSMHWVRQAPGKGLEWVSGISWNSGSKGYADSVKGRFTISRDNAKNSLYLQMNSLRAEDTALYYCAKDGSGYGKFYYYGLDVWGQGTTVTVSS

SEQ ID NO: 1579 - DNA, 24 bp, synthetic construct
  misc_feature 1..24: note = synthetic
  source 1..24: mol_type = other DNA
gggtttacattcgacgattacagc

SEQ ID NO: 1580 - protein, 8 aa, synthetic construct
  REGION 1..8: note = synthetic
GFTFDDYS

SEQ ID NO: 1581 - DNA, 24 bp, synthetic construct
  misc_feature 1..24: note = synthetic
  source 1..24: mol_type = other DNA
atatcatggaactcaggaagcaag

SEQ ID NO: 1582 - protein, 8 aa, synthetic construct
  REGION 1..8: note = synthetic
ISWNSGSK

SEQ ID NO: 1583 - DNA, 51 bp, synthetic construct
  misc_feature 1..51: note = synthetic
  source 1..51: mol_type = other DNA
gcaaaagacggcagtggttatggcaagttttattattatggactggacgtg

SEQ ID NO: 1584 - protein, 17 aa, synthetic construct
  REGION 1..17: note = synthetic
AKDGSGYGKFYYYGLDV

SEQ ID NO: 1585 - DNA, 372 bp, synthetic construct
  misc_feature 1..372: note = synthetic
  source 1..372: mol_type = other DNA
gaagtacagcttgtagaatccggcggaggactggtacaacctggaagaagtcttagactgagttgcgcagctagtgggtttacattcgacgattacagcatgcattgggtgaggcaagctcctggtaaaggattggaatgggttagcgggatatcatggaactcaggaagcaagggatacgccgacagcgtgaaaggccgatttacaatatctagggacaacgcaaaaaactctctctaccttcaaatgaactctcttagggcagaagacacagcattgtattattgcgcaaaagacggcagtggttatggcaagttttatcattatggaatggacgtgtggggacaagggacaacagtgacagtgagtagc

SEQ ID NO: 1586 - protein, 124 aa, synthetic construct
  REGION 1..124: note = synthetic
EVQLVESGGGLVQPGRSLRLSCAASGFTFDDYSMHWVRQAPGKGLEWVSGISWNSGSKGYADSVKGRFTISRDNAKNSLYLQMNSLRAEDTALYYCAKDGSGYGKFYHYGMDVWGQGTTVTVSS

SEQ ID NO: 1587 - DNA, 24 bp, synthetic construct
  misc_feature 1..24: note = synthetic
  source 1..24: mol_type = other DNA
gggtttacattcgacgattacagc

SEQ ID NO: 1588 - protein, 8 aa, synthetic construct
  REGION 1..8: note = synthetic
GFTFDDYS

SEQ ID NO: 1589 - DNA, 24 bp, synthetic construct
  misc_feature 1..24: note = synthetic
  source 1..24: mol_type = other DNA
atatcatggaactcaggaagcaag

SEQ ID NO: 1590 - protein, 8 aa, synthetic construct
  REGION 1..8: note = synthetic
ISWNSGSK

SEQ ID NO: 1591 - DNA, 51 bp, synthetic construct
  misc_feature 1..51: note = synthetic
  source 1..51: mol_type = other DNA
gcaaaagacggcagtggttatggcaagttttatcattatggaatggacgtg

SEQ ID NO: 1592 - protein, 17 aa, synthetic construct
  REGION 1..17: note = synthetic
AKDGSGYGKFYHYGMDV

SEQ ID NO: 1593 - DNA, 372 bp, synthetic construct
  misc_feature 1..372: note = synthetic
  source 1..372: mol_type = other DNA
gaagtacagcttgtagaatccggcggaggactggtacaacctggaagaagtcttagactgagttgcgcagctagtgggtttacattcgacgattacagcatgcattgggtgaggcaagctcctggtaaaggattggaatgggttagcgggatatcatggaactcaggaagcaagggatacgccgacagcgtgaaaggccgatttacaatatctagggacaacgcaaaaaactctctctaccttcaaatgaactctcttagggcagaagacacagcattgtattattgcgcaaaatacggcagtggttatggcaagttttattattatggaatggacgtgtggggacaagggacaacagtgacagtgagtagc

SEQ ID NO: 1594 - protein, 124 aa, synthetic construct
  REGION 1..124: note = synthetic
EVQLVESGGGLVQPGRSLRLSCAASGFTFDDYSMHWVRQAPGKGLEWVSGISWNSGSKGYADSVKGRFTISRDNAKNSLYLQMNSLRAEDTALYYCAKYGSGYGKFYYYGMDVWGQGTTVTVSS

SEQ ID NO: 1595 - DNA, 24 bp, synthetic construct
  misc_feature 1..24: note = synthetic
  source 1..24: mol_type = other DNA
gggtttacattcgacgattacagc

SEQ ID NO: 1596 - protein, 8 aa, synthetic construct
  REGION 1..8: note = synthetic
GFTFDDYS

SEQ ID NO: 1597 - DNA, 24 bp, synthetic construct
  misc_feature 1..24: note = synthetic
  source 1..24: mol_type = other DNA
atatcatggaactcaggaagcaag

SEQ ID NO: 1598 - protein, 8 aa, synthetic construct
  REGION 1..8: note = synthetic
ISWNSGSK

SEQ ID NO: 1599 - DNA, 51 bp, synthetic construct
  misc_feature 1..51: note = synthetic
  source 1..51: mol_type = other DNA
gcaaaatacggcagtggttatggcaagttttattattatggaatggacgtg

SEQ ID NO: 1600 - protein, 17 aa, synthetic construct
  REGION 1..17: note = synthetic
AKYGSGYGKFYYYGMDV

SEQ ID NO: 1601 - DNA, 372 bp, synthetic construct
  misc_feature 1..372: note = synthetic
  source 1..372: mol_type = other DNA
gaagtacagcttgtagaatccggcggaggactggtacaacctggaagaagtcttagactgagttgcgcagctagtgggtttacattcgacgattacagcatgcattgggtgaggcaagctcctggtaaaggattggaatgggttagcgggatatcatggaactcaggaagcatcggatacgccgacagcgtgaaaggccgatttacaatatctagggacaacgcaaaaaactctctctaccttcaaatgaactctcttagggcagaagacacagcattgtattattgcgcaaaagacggcagtggttatggcaagttttattattatggactggacgtgtggggacaagggacaacagtgacagtgagtagc

SEQ ID NO: 1602 - protein, 124 aa, synthetic construct
  REGION 1..124: note = synthetic
EVQLVESGGGLVQPGRSLRLSCAASGFTFDDYSMHWVRQAPGKGLEWVSGISWNSGSIGYADSVKGRFTISRDNAKNSLYLQMNSLRAEDTALYYCAKDGSGYGKFYYYGLDVWGQGTTVTVSS

SEQ ID NO: 1603 - DNA, 24 bp, synthetic construct
  misc_feature 1..24: note = synthetic
  source 1..24: mol_type = other DNA
gggtttacattcgacgattacagc

SEQ ID NO: 1604 - protein, 8 aa, synthetic construct
  REGION 1..8: note = synthetic
GFTFDDYS

SEQ ID NO: 1605 - DNA, 24 bp, synthetic construct
  misc_feature 1..24: note = synthetic
  source 1..24: mol_type = other DNA
atatcatggaactcaggaagcatc

SEQ ID NO: 1606 - protein, 8 aa, synthetic construct
  REGION 1..8: note = synthetic
ISWNSGSI

SEQ ID NO: 1607 - DNA, 51 bp, synthetic construct; identical to SEQ ID NO: 1583
  misc_feature 1..51: note = synthetic
  source 1..51: mol_type = other DNA

SEQ ID NO: 1608 - protein, 17 aa, synthetic construct
  REGION 1..17: note = synthetic
AKDGSGYGKFYYYGLDV

SEQ ID NO: 1609 - DNA, 372 bp, synthetic construct
  misc_feature 1..372: note = synthetic
  source 1..372: mol_type = other DNA
gaagtacagcttgtagaatccggcggaggactggtacaacctggaagaagtcttagactgagttgcgcagctagtgggtttacattcgacgattacagcatgcattgggtgaggcaagctcctggtaaaggattggaatgggttagcgggatatcatggaactcaggaagcatcggatacgccgacagcgtgaaaggccgatttacaatatctagggacaacgcaaaaaactctctctaccttcaaatgaactctcttagggcagaagacacagcattgtattattgcgcaaaagacggcagtggttatggcaagttttatcattatggaatggacgtgtggggacaagggacaacagtgacagtgagtagc

SEQ ID NO: 1610 - protein, 124 aa, synthetic construct
  REGION 1..124: note = synthetic
EVQLVESGGGLVQPGRSLRLSCAASGFTFDDYSMHWVRQAPGKGLEWVSGISWNSGSIGYADSVKGRFTISRDNAKNSLYLQMNSLRAEDTALYYCAKDGSGYGKFYHYGMDVWGQGTTVTVSS

SEQ ID NO: 1611 - DNA, 24 bp, synthetic construct
  misc_feature 1..24: note = synthetic
  source 1..24: mol_type = other DNA
gggtttacattcgacgattacagc

SEQ ID NO: 1612 - protein, 8 aa, synthetic construct
  REGION 1..8: note = synthetic
GFTFDDYS

SEQ ID NO: 1613 - DNA, 24 bp, synthetic construct
  misc_feature 1..24: note = synthetic
  source 1..24: mol_type = other DNA
atatcatggaactcaggaagcatc

SEQ ID NO: 1614 - protein, 8 aa, synthetic construct
  REGION 1..8: note = synthetic
ISWNSGSI

SEQ ID NO: 1615 - DNA, 51 bp, synthetic construct; identical to SEQ ID NO: 1591
  misc_feature 1..51: note = synthetic
  source 1..51: mol_type = other DNA

SEQ ID NO: 1616 - protein, 17 aa, synthetic construct
  REGION 1..17: note = synthetic
AKDGSGYGKFYHYGMDV

SEQ ID NO: 1617 - DNA, 372 bp, synthetic construct
  misc_feature 1..372: note = synthetic
  source 1..372: mol_type = other DNA
gaagtacagcttgtagaatccggcggaggactggtacaacctggaagaagtcttagactgagttgcgcagctagtgggtttacattcgacgattacagcatgcattgggtgaggcaagctcctggtaaaggattggaatgggttagcgggatatcatggaactcaggaagcatcggatacgccgacagcgtgaaaggccgatttacaatatctagggacaacgcaaaaaactctctctaccttcaaatgaactctcttagggcagaagacacagcattgtattattgcgcaaaatacggcagtggttatggcaagttttattattatggaatggacgtgtggggacaagggacaacagtgacagtgagtagc

SEQ ID NO: 1618 - protein, 124 aa, synthetic construct
  REGION 1..124: note = synthetic
EVQLVESGGGLVQPGRSLRLSCAASGFTFDDYSMHWVRQAPGKGLEWVSGISWNSGSIGYADSVKGRFTISRDNAKNSLYLQMNSLRAEDTALYYCAKYGSGYGKFYYYGMDVWGQGTTVTVSS

SEQ ID NO: 1619 - DNA, 24 bp, synthetic construct
  misc_feature 1..24: note = synthetic
  source 1..24: mol_type = other DNA
gggtttacattcgacgattacagc

SEQ ID NO: 1620 - protein, 8 aa, synthetic construct
  REGION 1..8: note = synthetic
GFTFDDYS

SEQ ID NO: 1621 - DNA, 24 bp, synthetic construct
  misc_feature 1..24: note = synthetic
  source 1..24: mol_type = other DNA
atatcatggaactcaggaagcatc

SEQ ID NO: 1622 - protein, 8 aa, synthetic construct
  REGION 1..8: note = synthetic
ISWNSGSI

SEQ ID NO: 1623 - DNA, 51 bp, synthetic construct; identical to SEQ ID NO: 1599
  misc_feature 1..51: note = synthetic
  source 1..51: mol_type = other DNA

SEQ ID NO: 1624 - protein, 17 aa, synthetic construct
  REGION 1..17: note = synthetic
AKYGSGYGKFYYYGMDV

SEQ ID NO: 1625 - DNA, 372 bp, synthetic construct
  misc_feature 1..372: note = synthetic
  source 1..372: mol_type = other DNA
gaagtacagcttgtagaatccggcggaggactggtacaacctggaagaagtcttagactgagttgcgcagctagtgggtttacattcgacgattacagcatgcattgggtgaggcaagctcctggtaaaggattggaatgggttagcgggatatcatggaactcaggaagcaagggatacgccgacagcgtgaaaggccgatttacaatatctagggacaacgcaaaaaactctctctaccttcaaatgaactctcttagggcagaagacacagcattgtattattgcgcaaaagacggcagtggttatggcaagttttattattatggaatggacgtgtggggacaagggacaacagtgacagtgagtagc

SEQ ID NO: 1626 - protein, 124 aa, synthetic construct
  REGION 1..124: note = synthetic
EVQLVESGGGLVQPGRSLRLSCAASGFTFDDYSMHWVRQAPGKGLEWVSGISWNSGSKGYADSVKGRFTISRDNAKNSLYLQMNSLRAEDTALYYCAKDGSGYGKFYYYGMDVWGQGTTVTVSS

SEQ ID NO: 1627 - DNA, 24 bp, synthetic construct
  misc_feature 1..24: note = synthetic
  source 1..24: mol_type = other DNA
gggtttacattcgacgattacagc

SEQ ID NO: 1628 - protein, 8 aa, synthetic construct
  REGION 1..8: note = synthetic
GFTFDDYS

SEQ ID NO: 1629 - DNA, 24 bp, synthetic construct
  misc_feature 1..24: note = synthetic
  source 1..24: mol_type = other DNA
atatcatggaactcaggaagcaag

SEQ ID NO: 1630 - protein, 8 aa, synthetic construct
  REGION 1..8: note = synthetic
ISWNSGSK

SEQ ID NO: 1631 - DNA, 51 bp, synthetic construct
  misc_feature 1..51: note = synthetic
  source 1..51: mol_type = other DNA
gcaaaagacggcagtggttatggcaagttttattattatggaatggacgtg

SEQ ID NO: 1632 - protein, 17 aa, synthetic construct
  REGION 1..17: note = synthetic
AKDGSGYGKFYYYGMDV

SEQ ID NO: 1633 - DNA, 372 bp, synthetic construct
  misc_feature 1..372: note = synthetic
  source 1..372: mol_type = other DNA
gaagtgcagctggtggagtctgggggaggcttggtacagcctggcaggtccctgagactctcctgtgtagcctctggattcacctttgatgattattccatgcactgggtccggcaagctccagggaagggcctggagtgggtctcaggtattagttggaatagtggtagcaaagactatgcggactctgtgaagggccgattcaccatctccagagacaacgccaagaactccctgtatctgcaaatgaacagtctgagagctgaagacacggccttgtattactgtgcaaaatatggaagtggctacgggaagttctaccactacggtttggacgtctggggccaagggaccacggtcaccgtctcctca

SEQ ID NO: 1634 - protein, 124 aa, synthetic construct; identical to SEQ ID NO: 1258
  REGION 1..124: note = synthetic

SEQ ID NO: 1635 - DNA, 24 bp, synthetic construct
  misc_feature 1..24: note = synthetic
  source 1..24: mol_type = other DNA
ggattcacctttgatgattattcc

SEQ ID NO: 1636 - protein, 8 aa, synthetic construct
  REGION 1..8: note = synthetic
GFTFDDYS

SEQ ID NO: 1637 - DNA, 24 bp, synthetic construct
  misc_feature 1..24: note = synthetic
  source 1..24: mol_type = other DNA
attagttggaatagtggtagcaaa

SEQ ID NO: 1638 - protein, 8 aa, synthetic construct
  REGION 1..8: note = synthetic
ISWNSGSK

SEQ ID NO: 1639 - DNA, 51 bp, synthetic construct; identical to SEQ ID NO: 1263
  misc_feature 1..51: note = synthetic
  source 1..51: mol_type = other DNA

SEQ ID NO: 1640 - protein, 17 aa, synthetic construct
  REGION 1..17: note = synthetic
AKYGSGYGKFYHYGLDV

SEQ ID NO: 1641 - DNA, 324 bp, synthetic construct; identical to SEQ ID NO: 145
  misc_feature 1..324: note = synthetic
  source 1..324: mol_type = other DNA

SEQ ID NO: 1642 - protein, 108 aa, synthetic construct; identical to SEQ ID NO: 146
  REGION 1..108: note = synthetic

SEQ ID NO: 1643 - DNA, 18 bp, synthetic construct
  misc_feature 1..18: note = synthetic
  source 1..18: mol_type = other DNA
cagagcattaacaactat

SEQ ID NO: 1644 - protein, 6 aa, synthetic construct
  REGION 1..6: note = synthetic
QSINNY

SEQ ID NO: 1645-1646 - skipped (2 entries)

SEQ ID NO: 1647 - DNA, 30 bp, synthetic construct; identical to SEQ ID NO: 151
  misc_feature 1..30: note = synthetic
  source 1..30: mol_type = other DNA

SEQ ID NO: 1648 - protein, 10 aa, synthetic construct
  REGION 1..10: note = synthetic
QQSFSTPPIT

SEQ ID NO: 1649 - protein, 207 aa, synthetic construct
  REGION 1..207: note = synthetic
MQSGTHWRVLGLCLLSVGVWGQDGNEEMGGITQTPYKVSISGTTVILTCPQYPGSEILWQHNDKNIGGDEDDKNIGSDEDHLSLKEFSELEQSGYYVCYPRGSKPEDANFYLYLRARVCENCMEMDVMSVATIVIVDICITGGLLLLVYYWSKNRKAKAKPVTRGAGAGGRQRGQNKERPPPVPNPDYEPIRKGQRDLYSGLNQRRI

SEQ ID NO: 1650 - protein, 171 aa, synthetic construct
  REGION 1..171: note = synthetic
MEHSTFLSGLVLATLLSQVSPFKIPIEELEDRVFVNCNTSITWVEGTVGTLLSDITRLDLGKRILDPRGIYRCNGTDIYKDKESTVQVHYRMCQSCVELDPATVAGIIVTDVIATLLLALGVFCFAGHETGRLSGAADTQALLRNDQVYQPLRDRDDAQYSHLGGNWARNK

SEQ ID NO: 1651 - protein, 750 aa, synthetic construct
  REGION 1..750: note = synthetic
MWNLLHETDSAVATARRPRWLCAGALVLAGGFFLLGFLFGWFIKSSNEATNITPKHNMKAFLDELKAENIKKFLYNFTQIPHLAGTEQNFQLAKQIQSQWKEFGLDSVELAHYDVLLSYPNKTHPNYISIINEDGNEIFNTSLFEPPPPGYENVSDIVPPFSAFSPQGMPEGDLVYVNYARTEDFFKLERDMKINCSGKIVIARYGKVFRGNKVKNAQLAGAKGVILYSDPADYFAPGVKSYPDGWNLPGGGVQRGNILNLNGAGDPLTPGYPANEYAYRRGIAEAVGLPSIPVHPIGYYDAQKLLEKMGGSAPPDSSWRGSLKVPYNVGPGFTGNFSTQKVKMHIHSTNEVTRIYNVIGTLRGAVEPDRYVILGGHRDSWVFGGIDPQSGAAVVHEIVRSFGTLKKEGWRPRRTILFASWDAEEFGLLGSTEWAEENSRLLQERGVAYINADSSIEGNYTLRVDCTPLMYSLVHNLTKELKSPDEGFEGKSLYESWTKKSPSPEFSGMPRISKLGSGNDFEVFFQRLGIASGRARYTKNWETNKFSGYPLYHSVYETYELVEKFYDPMFKYHLTVAQVRGGMVFELANSIVLPFDCRDYAVVLRKYADKIYSISMKHPQEMKTYSVSFDSLFSAVKNFTEIASKFSERLQDFDKSNPIVLRMMNDQLMFLERAFIDPLGLPDRPFYRHVIYAPSSHNKYAGESFPGIYDALFDIESKVDPSKAWGEVKRQIYVAAFTVQAAAETLSEVA

SEQ ID NO: 1652 - protein, 207 aa, synthetic construct; identical to SEQ ID NO: 1649
  REGION 1..207: note = synthetic

SEQ ID NO: 1653 - protein, 171 aa, synthetic construct; identical to SEQ ID NO: 1650
  REGION 1..171: note = synthetic

SEQ ID NO: 1654 - protein, 750 aa, synthetic construct; identical to SEQ ID NO: 1651
  REGION 1..750: note = synthetic

SEQ ID NO: 1655 - protein, 25 aa, synthetic construct [sequence omitted]

SEQ ID NO: 1656 - protein, 17 aa, synthetic construct
  REGION 1..17: note = synthetic
MHWVRQAPGKGLEWVSG

SEQ ID NO: 1657 - protein, 38 aa, synthetic construct
  REGION 1..38: note = synthetic
GYADSVKGRFTISRDNAKNSLYLQMNSLRAEDTALYYC

SEQ ID NO: 1658 - protein, 11 aa, synthetic construct
  REGION 1..11: note = synthetic
WGQGTTVTVSS

SEQ ID NO: 1659 - protein, 8 aa, synthetic construct
  REGION 1..8: note = synthetic
  VARIANT 8: note = Xaa = Any Amino Acid
GFTFDDYX

SEQ ID NO: 1660 - protein, 8 aa, synthetic construct
  REGION 1..8: note = synthetic
  VARIANT 8: note = Xaa = Any Amino Acid
ISWNSGSX

SEQ ID NO: 1661 - protein, 17 aa, synthetic construct
  REGION 1..17: note = synthetic
  VARIANT 3..15: note = Xaa = Any Amino Acid
AKXGSGYGKFYXYGXDV

SEQ ID NO: 1662 - protein, 125 aa, synthetic construct
  REGION 1..125: note = synthetic
EVQLVESGGGLVQPGRSLRLSCAASGFTFDDYAMHWVRQAPGKGLEWVSGISWNSGSIGYADSVKGRFTISRDNAKNSLYLQMNSLRAEDTALYYCAKDGYSGYGYFYYYGMDVWGQGTTVTVSS

SEQ ID NO: 1663 - protein, 330 aa, synthetic construct [sequence omitted]

SEQ ID NO: 1664 - protein, 330 aa, synthetic construct
  REGION 1..330: note = synthetic
ASTKGPSVFPLAPSSKSTSGGTAALGCLVKDYFPEPVTVSWNSGALTSGVHTFPAVLQSSGLYSLSSVVTVPSSSLGTQTYICNVNHKPSNTKVDKKVEPKSCDKTHTCPPCPAPELLGGPSVFLFPPKPKDTLMISRTPEVTCVVVDVSHEDPEVKFNWYVDGVEVHNAKTKPREEQYNSTYRVVSVLTVLHQDWLNGKEYKCKVSNKALPAPIEKTISKAKGQPREPQVYTLPPSRDELTKNQVSLTCLVKGFYPSDIAVEWESNGQPENNYKTTPPVLDSDGSFFLYSKLTVDKSRWQQGNVFSCSVMHEALHNRFTQKSLSLSPGK

SEQ ID NO: 1665 - protein, 326 aa, synthetic construct
  REGION 1..326: note = synthetic
ASTKGPSVFPLAPCSRSTSESTAALGCLVKDYFPEPVTVSWNSGALTSGVHTFPAVLQSSGLYSLSSVVTVPSSNFGTQTYTCNVDHKPSNTKVDKTVERKCCVECPPCPAPPVAGPSVFLFPPKPKDTLMISRTPEVTCVVVDVSHEDPEVQFNWYVDGVEVHNAKTKPREEQFNSTFRVVSVLTVVHQDWLNGKEYKCKVSNKGLPAPIEKTISKTKGQPREPQVYTLPPSREEMTKNQVSLTCLVKGFYPSDISVEWESNGQPENNYKTTPPMLDSDGSFFLYSKLTVDKSRWQQGNVFSCSVMHEALHNHYTQKSLSLSPGK

SEQ ID NO: 1666 - protein, 326 aa, synthetic construct
  REGION 1..326: note = synthetic
ASTKGPSVFPLAPCSRSTSESTAALGCLVKDYFPEPVTVSWNSGALTSGVHTFPAVLQSSGLYSLSSVVTVPSSNFGTQTYTCNVDHKPSNTKVDKTVERKCCVECPPCPAPPVAGPSVFLFPPKPKDTLMISRTPEVTCVVVDVSHEDPEVQFNWYVDGVEVHNAKTKPREEQFNSTFRVVSVLTVVHQDWLNGKEYKCKVSNKGLPAPIEKTISKTKGQPREPQVYTLPPSREEMTKNQVSLTCLVKGFYPSDISVEWESNGQPENNYKTTPPMLDSDGSFFLYSKLTVDKSRWQQGNVFSCSVMHEALHNRFTQKSLSLSPGK

SEQ ID NO: 1667 - protein, 327 aa, synthetic construct
  REGION 1..327: note = synthetic
ASTKGPSVFPLAPCSRSTSESTAALGCLVKDYFPEPVTVSWNSGALTSGVHTFPAVLQSSGLYSLSSVVTVPSSSLGTKTYTCNVDHKPSNTKVDKRVESKYGPPCPSCPAPEFLGGPSVFLFPPKPKDTLMISRTPEVTCVVVDVSQEDPEVQFNWYVDGVEVHNAKTKPREEQFNSTYRVVSVLTVLHQDWLNGKEYKCKVSNKGLPSSIEKTISKAKGQPREPQVYTLPPSQEEMTKNQVSLTCLVKGFYPSDIAVEWESNGQPENNYKTTPPVLDSDGSFFLYSRLTVDKSRWQEGNVFSCSVMHEALHNHYTQKSLSLSLGK

SEQ ID NO: 1668 - protein, 327 aa, synthetic construct
  REGION 1..327: note = synthetic
ASTKGPSVFPLAPCSRSTSESTAALGCLVKDYFPEPVTVSWNSGALTSGVHTFPAVLQSSGLYSLSSVVTVPSSSLGTKTYTCNVDHKPSNTKVDKRVESKYGPPCPSCPAPEFLGGPSVFLFPPKPKDTLMISRTPEVTCVVVDVSQEDPEVQFNWYVDGVEVHNAKTKPREEQFNSTYRVVSVLTVLHQDWLNGKEYKCKVSNKGLPSSIEKTISKAKGQPREPQVYTLPPSQEEMTKNQVSLTCLVKGFYPSDIAVEWESNGQPENNYKTTPPVLDSDGSFFLYSRLTVDKSRWQEGNVFSCSVMHEALHNRFTQKSLSLSLGK

SEQ ID NO: 1669 - protein, 329 aa, synthetic construct
  REGION 1..329: note = synthetic
ASTKGPSVFPLAPSSKSTSGGTAALGCLVKDYFPEPVTVSWNSGALTSGVHTFPAVLQSSGLYSLSSVVTVPSSSLGTQTYICNVNHKPSNTKVDKKVEPKSCDKTHTCPPCPAPPVAGPSVFLFPPKPKDTLMISRTPEVTCVVVDVSQEDPEVQFNWYVDGVEVHNAKTKPREEQFNSTYRVVSVLTVLHQDWLNGKEYKCKVSNKGLPSSIEKTISKAKGQPREPQVYTLPPSRDELTKNQVSLTCLVKGFYPSDIAVEWESNGQPENNYKTTPPVLDSDGSFFLYSKLTVDKSRWQQGNVFSCSVMHEALHNHYTQKSLSLSPGK

SEQ ID NO: 1670 - protein, 329 aa, synthetic construct
  REGION 1..329: note = synthetic
ASTKGPSVFPLAPSSKSTSGGTAALGCLVKDYFPEPVTVSWNSGALTSGVHTFPAVLQSSGLYSLSSVVTVPSSSLGTQTYICNVNHKPSNTKVDKKVEPKSCDKTHTCPPCPAPPVAGPSVFLFPPKPKDTLMISRTPEVTCVVVDVSQEDPEVQFNWYVDGVEVHNAKTKPREEQFNSTYRVVSVLTVLHQDWLNGKEYKCKVSNKGLPSSIEKTISKAKGQPREPQVYTLPPSRDELTKNQVSLTCLVKGFYPSDIAVEWESNGQPENNYKTTPPVLDSDGSFFLYSKLTVDKSRWQQGNVFSCSVMHEALHNRFTQKSLSLSPGK

SEQ ID NO: 1671 - protein, 326 aa, synthetic construct
  REGION 1..326: note = synthetic
ASTKGPSVFPLAPCSRSTSESTAALGCLVKDYFPEPVTVSWNSGALTSGVHTFPAVLQSSGLYSLSSVVTVPSSSLGTKTYTCNVDHKPSNTKVDKRVESKYGPPCPPCPAPPVAGPSVFLFPPKPKDTLMISRTPEVTCVVVDVSQEDPEVQFNWYVDGVEVHNAKTKPREEQFNSTYRVVSVLTVLHQDWLNGKEYKCKVSNKGLPSSIEKTISKAKGQPREPQVYTLPPSQEEMTKNQVSLTCLVKGFYPSDIAVEWESNGQPENNYKTTPPVLDSDGSFFLYSRLTVDKSRWQEGNVFSCSVMHEALHNHYTQKSLSLSLGK

SEQ ID NO: 1672 - protein, 326 aa, synthetic construct
  REGION 1..326: note = synthetic
ASTKGPSVFPLAPCSRSTSESTAALGCLVKDYFPEPVTVSWNSGALTSGVHTFPAVLQSSGLYSLSSVVTVPSSSLGTKTYTCNVDHKPSNTKVDKRVESKYGPPCPPCPAPPVAGPSVFLFPPKPKDTLMISRTPEVTCVVVDVSQEDPEVQFNWYVDGVEVHNAKTKPREEQFNSTYRVVSVLTVLHQDWLNGKEYKCKVSNKGLPSSIEKTISKAKGQPREPQVYTLPPSQEEMTKNQVSLTCLVKGFYPSDIAVEWESNGQPENNYKTTPPVLDSDGSFFLYSRLTVDKSRWQEGNVFSCSVMHEALHNRFTQKSLSLSLGK

SEQ ID NO: 1673 - protein, 232 aa, synthetic construct
  REGION 1..232: note = synthetic
EPKSCDKTHTCPPCPAPELLGGPSVFLFPPKPKDTLMISRTPEVTCVVVDVSHEDPEVKFNWYVDGVEVHNAKTKPREEQYNSTYRVVSVLTVLHQDWLNGKEYKCKVSNKALPAPIEKTISKAKGQPREPQVYTLPPSRDELTKNQVSLTCLVKGFYPSDIAVEWESNGQPENNYKTTPPVLDSDGSFFLYSKLTVDKSRWQQGNVFSCSVMHEALHNHYTQKSLSLSPGK

SEQ ID NO: 1674 - protein, 232 aa, synthetic construct
  REGION 1..232: note = synthetic
EPKSCDKTHTCPPCPAPELLGGPSVFLFPPKPKDTLMISRTPEVTCVVVDVSHEDPEVKFNWYVDGVEVHNAKTKPREEQYNSTYRVVSVLTVLHQDWLNGKEYKCKVSNKALPAPIEKTISKAKGQPREPQVYTLPPSRDELTKNQVSLTCLVKGFYPSDIAVEWESNGQPENNYKTTPPVLDSDGSFFLYSKLTVDKSRWQQGNVFSCSVMHEALHNRFTQKSLSLSPGK

SEQ ID NO: 1675 - protein, 228 aa, synthetic construct
  REGION 1..228: note = synthetic
ERKCCVECPPCPAPPVAGPSVFLFPPKPKDTLMISRTPEVTCVVVDVSHEDPEVQFNWYVDGVEVHNAKTKPREEQFNSTFRVVSVLTVVHQDWLNGKEYKCKVSNKGLPAPIEKTISKTKGQPREPQVYTLPPSREEMTKNQVSLTCLVKGFYPSDISVEWESNGQPENNYKTTPPMLDSDGSFFLYSKLTVDKSRWQQGNVFSCSVMHEALHNHYTQKSLSLSPGK

SEQ ID NO: 1676 - protein, 228 aa, synthetic construct
  REGION 1..228: note = synthetic
ERKCCVECPPCPAPPVAGPSVFLFPPKPKDTLMISRTPEVTCVVVDVSHEDPEVQFNWYVDGVEVHNAKTKPREEQFNSTFRVVSVLTVVHQDWLNGKEYKCKVSNKGLPAPIEKTISKTKGQPREPQVYTLPPSREEMTKNQVSLTCLVKGFYPSDISVEWESNGQPENNYKTTPPMLDSDGSFFLYSKLTVDKSRWQQGNVFSCSVMHEALHNRFTQKSLSLSPGK

SEQ ID NO: 1677 - protein, 229 aa, synthetic construct
  REGION 1..229: note = synthetic
ESKYGPPCPSCPAPEFLGGPSVFLFPPKPKDTLMISRTPEVTCVVVDVSQEDPEVQFNWYVDGVEVHNAKTKPREEQFNSTYRVVSVLTVLHQDWLNGKEYKCKVSNKGLPSSIEKTISKAKGQPREPQVYTLPPSQEEMTKNQVSLTCLVKGFYPSDIAVEWESNGQPENNYKTTPPVLDSDGSFFLYSRLTVDKSRWQEGNVFSCSVMHEALHNRFTQKSLSLSLGK

SEQ ID NO: 1678 - protein, 229 aa, synthetic construct
  REGION 1..229: note = synthetic
ESKYGPPCPSCPAPEFLGGPSVFLFPPKPKDTLMISRTPEVTCVVVDVSQEDPEVQFNWYVDGVEVHNAKTKPREEQFNSTYRVVSVLTVLHQDWLNGKEYKCKVSNKGLPSSIEKTISKAKGQPREPQVYTLPPSQEEMTKNQVSLTCLVKGFYPSDIAVEWESNGQPENNYKTTPPVLDSDGSFFLYSRLTVDKSRWQEGNVFSCSVMHEALHNHYTQKSLSLSLGK

SEQ ID NO: 1679 - protein, 231 aa, synthetic construct
  REGION 1..231: note = synthetic
EPKSCDKTHTCPPCPAPPVAGPSVFLFPPKPKDTLMISRTPEVTCVVVDVSQEDPEVQFNWYVDGVEVHNAKTKPREEQFNSTYRVVSVLTVLHQDWLNGKEYKCKVSNKGLPSSIEKTISKAKGQPREPQVYTLPPSRDELTKNQVSLTCLVKGFYPSDIAVEWESNGQPENNYKTTPPVLDSDGSFFLYSKLTVDKSRWQQGNVFSCSVMHEALHNHYTQKSLSLSPGK

SEQ ID NO: 1680 - protein, 231 aa, synthetic construct
  REGION 1..231: note = synthetic
EPKSCDKTHTCPPCPAPPVAGPSVFLFPPKPKDTLMISRTPEVTCVVVDVSQEDPEVQFNWYVDGVEVHNAKTKPREEQFNSTYRVVSVLTVLHQDWLNGKEYKCKVSNKGLPSSIEKTISKAKGQPREPQVYTLPPSRDELTKNQVSLTCLVKGFYPSDIAVEWESNGQPENNYKTTPPVLDSDGSFFLYSKLTVDKSRWQQGNVFSCSVMHEALHNRFTQKSLSLSPGK

SEQ ID NO: 1681 - protein, 228 aa, synthetic construct
  REGION 1..228: note = synthetic
ESKYGPPCPPCPAPPVAGPSVFLFPPKPKDTLMISRTPEVTCVVVDVSQEDPEVQFNWYVDGVEVHNAKTKPREEQFNSTYRVVSVLTVLHQDWLNGKEYKCKVSNKGLPSSIEKTISKAKGQPREPQVYTLPPSQEEMTKNQVSLTCLVKGFYPSDIAVEWESNGQPENNYKTTPPVLDSDGSFFLYSRLTVDKSRWQEGNVFSCSVMHEALHNHYTQKSLSLSLGK

SEQ ID NO: 1682 - protein, 228 aa, synthetic construct
  REGION 1..228: note = synthetic
ESKYGPPCPPCPAPPVAGPSVFLFPPKPKDTLMISRTPEVTCVVVDVSQEDPEVQFNWYVDGVEVHNAKTKPREEQFNSTYRVVSVLTVLHQDWLNGKEYKCKVSNKGLPSSIEKTISKAKGQPREPQVYTLPPSQEEMTKNQVSLTCLVKGFYPSDIAVEWESNGQPENNYKTTPPVLDSDGSFFLYSRLTVDKSRWQEGNVFSCSVMHEALHNRFTQKSLSLSLGK

SEQ ID NO: 1683 - protein, 227 aa, synthetic construct
  REGION 1..227: note = synthetic
DKTHTCPPCPAPELLGGPSVFLFPPKPKDTLMISRTPEVTCVVVDVSHEDPEVKFNWYVDGVEVHNAKTKPREEQYNSTYRVVSVLTVLHQDWLNGKEYKCKVSNKALPAPIEKTISKAKGQPREPQVYTLPPSRDELTKNQVSLTCLVKGFYPSDIAVEWESNGQPENNYKTTPPVLDSDGSFFLYSKLTVDKSRWQQGNVFSCSVMHEALHNRFTQKSLSLSPGK

SEQ ID NO: 1684 - protein, 227 aa, synthetic construct
  REGION 1..227: note = synthetic
DKTHTCPPCPAPELLGGPSVFLFPPKPKDTLMISRTPEVTCVVVDVSHEDPEVKFNWYVDGVEVHNAKTKPREEQYNSTYRVVSVLTVLHQDWLNGKEYKCKVSNKALPAPIEKTISKAKGQPREPQVYTLPPSRDELTKNQVSLTCLVKGFYPSDIAVEWESNGQPENNYKTTPPVLDSDGSFFLYSKLTVDKSRWQQGNVFSCSVMHEALHNHYTQKSLSLSPGK

SEQ ID NO: 1685 - protein, 233 aa, synthetic construct
  REGION 1..233: note = synthetic
EPRGPTIKPCPPCKCPAPNLLGGPSVFIFPPKIKDVLMISLSPIVTCVVVDVSEDDPDVQISWFVNNVEVHTAQTQTHREDYNSTLRVVSALPIQHQDWMSGKEFKCKVNNKDLPAPIERTISKPKGSVRAPQVYVLPPPEEEMTKKQVTLTCMVTDFMPEDIYVEWTNNGKTELNYKNTEPVLDSDGSYFMYSKLRVEKKNWVERNSYSCSVVHEGLHNRFTTKSFSRTPGK

SEQ ID NO: 1686 - protein, 233 aa, synthetic construct
  REGION 1..233: note = synthetic
EPRGPTIKPCPPCKCPAPNLLGGPSVFIFPPKIKDVLMISLSPIVTCVVVDVSEDDPDVQISWFVNNVEVHTAQTQTHREDYNSTLRVVSALPIQHQDWMSGKEFKCKVNNKDLPAPIERTISKPKGSVRAPQVYVLPPPEEEMTKKQVTLTCMVTDFMPEDIYVEWTNNGKTELNYKNTEPVLDSDGSYFMYSKLRVEKKNWVERNSYSCSVVHEGLHNHHTTKSFSRTPGK

What is claimed is:

1. An isolated antibody or antigen-binding fragment thereof that binds human prostate-specific membrane antigen (PSMA) with a binding dissociation equilibrium constant (K_{D}) value of less than about 80 nM as measured in a surface plasmon resonance assay at 37° C.

2. An isolated antibody or antigen-binding fragment thereof that binds human PSMA with a dissociative half-life (t½) of greater than about 10 minutes as measured in a surface plasmon resonance assay at 37° C.

3. The antibody or antigen-binding fragment of any one of claims 1 to 2, wherein the antibody or antigen-binding fragment thereof competes for binding to human PSMA with a reference antibody comprising an HCVR/LCVR amino acid sequence pair as set forth in Table 1.

4. The antibody or antigen-binding fragment of claim 3, wherein the reference antibody comprises an HCVR/LCVR amino acid sequence pair selected from the group consisting of SEQ ID NOs: 2/1642; 10/1642; 18/1642; 26/1642; 34/1642; 42/1642; 50/1642; 58/1642; 66/1642; 74/1642; 82/1642; 90/1642; 98/1642; 106/1642; 114/1642; 122/130; and 138/146.

5. The antibody or antigen-binding fragment of any one of claims 1 to 4, wherein the antibody or antigen-binding fragment thereof binds to the same epitope on human PSMA as a reference antibody comprising an HCVR/LCVR amino acid sequence pair as set forth in Table 1.

6. The antibody or antigen-binding fragment of claim 5, wherein the antibody or antigen-binding fragment thereof binds to the same epitope on human PSMA as a reference antibody comprising an HCVR/LCVR amino acid sequence pair selected from the group consisting of SEQ ID NOs: 2/1642; 10/1642; 18/1642; 26/1642; 34/1642; 42/1642; 50/1642; 58/1642; 66/1642; 74/1642; 82/1642; 90/1642; 98/1642; 106/1642; 114/1642; 122/130; and 138/146.

7. An isolated antibody or antigen-binding fragment thereof that binds human PSMA, wherein the antibody or antigen-binding fragment comprises: (a) the complementarity determining regions (CDRs) of a heavy chain variable region (HCVR) having an amino acid sequence as set forth in Table 1; and (b) the CDRs of a light chain variable region (LCVR) having an amino acid sequence as set forth in Table 1.

8. The isolated antibody or antigen-binding fragment of claim 7, wherein the antibody or antigen-binding fragment comprises the heavy and light chain CDRs of a HCVR/LCVR amino acid sequence pair selected from the group consisting of: SEQ ID NOs: 2/1642; 10/1642; 18/1642; 26/1642; 34/1642; 42/1642; 50/1642; 58/1642; 66/1642; 74/1642; 82/1642; 90/1642; 98/1642; 106/1642; 114/1642; 122/130; and 138/146.

9. The isolated antibody or antigen-binding fragment of claim 8, wherein the antibody or antigen-binding fragment comprises HCDR1-HCDR2-HCDR3-LCDR1-LCDR2-LCDR3 domains, respectively, selected from the group consisting of: SEQ ID NOs: 4-6-8-1644-1646-1648; 12-14-16-1644-1646-1648; 20-22-24-1644-1646-1648; 28-30-32-1644-1646-1648; 36-38-40-1644-1646-1648; 44-46-48-1644-1646-1648; 52-54-56-1644-1646-1648; 60-62-64-1644-1646-1648; 68-70-72-1644-1646-1648; 76-78-80-1644-1646-1648; 84-86-88-1644-1646-1648; 92-94-96-1644-1646-1648; 100-102-104-1644-1646-1648; 108-110-112-1644-1646-1648; 116-118-120-1644-1646-1648; 124-126-128-132-134-136; and 140-142-144-148-150-152.

10. An isolated antibody or antigen-binding fragment thereof that binds human PSMA, wherein the antibody or antigen-binding fragment comprises: (a) a heavy chain variable region (HCVR) having an amino acid sequence selected from the group consisting of SEQ ID NOs: 2, 10, 18, 26, 34, 42, 50, 58, 66, 74, 82, 90, 98, 106, 114, 122, and 138; and (b) a light chain variable region (LCVR) having an amino acid sequence selected from the group consisting of SEQ ID NOs: 130 and 146.

11. The isolated antibody or antigen-binding fragment of claim 10, wherein the antibody or antigen-binding fragment comprises a HCVR/LCVR amino acid sequence pair selected from the group consisting of: SEQ ID NOs: 2/1642; 10/1642; 18/1642; 26/1642; 34/1642; 42/1642; 50/1642; 58/1642; 66/1642; 74/1642; 82/1642; 90/1642; 98/1642; 106/1642; 114/1642; 122/130; and 138/146.

12. A bispecific antigen-binding molecule comprising a first antigen-binding domain that binds human CD3 and a second antigen-binding domain that binds human PSMA, wherein the second antigen-binding domain is derived from the antibody or antigen-binding fragment of any one of claims 1-11.

13. A bispecific antigen-binding molecule comprising a first antigen-binding domain that specifically binds human CD3, and a second antigen-binding domain that specifically binds human PSMA.

14. The bispecific antigen-binding molecule of claim 12 or claim 13, wherein the first antigen-binding domain binds human cells expressing human CD3 and cynomolgus monkey cells expressing cynomolgus CD3.

15. The bispecific antigen-binding molecule of claim 12 or claim 13, wherein the second antigen-binding domain binds human cells expressing human PSMA and cynomolgus monkey cells expressing cynomolgus PSMA.

16. The bispecific antigen-binding molecule of claim 12 or claim 13, wherein the antigen-binding molecule binds both human CD3 and human PSMA and induces T cell-mediated cell killing of PSMA-expressing cells.

17. The bispecific antigen-binding molecule of claim 12 or claim 13 wherein the antigen-binding molecule inhibits tumor growth in immunocompromised mice bearing human prostate cancer xenografts.

18. The bispecific antigen-binding molecule of claim 12 or claim 13, wherein the antigen-binding molecule inhibits tumor growth in immunocompetent mice bearing human prostate cancer xenografts.

19. The bispecific antigen-binding molecule of claim 12 or claim 13, wherein the antigen-binding molecule suppresses tumor growth of established tumors in immunocompromised mice bearing human prostate cancer xenografts.

20. The bispecific antigen-binding molecule of claim 12 or claim 13, wherein the antigen-binding molecule reduces tumor growth of established tumors in immunocompetent mice bearing human prostate cancer xenografts.

21. The bispecific antigen-binding molecule of any one of claims 12-20, wherein the antigen-binding molecule induces T cell-mediated tumor cell killing with an EC₅₀ value of less than about 1.3 nM, as measured in an in vitro T cell-mediated tumor cell killing assay.

22. A bispecific antigen-binding molecule of any one of claims 12-21, wherein the second antigen-binding domain specifically binds human PSMA with an K_{D} value of less than about 80 nM, as measured in an in vitro surface plasmon resonance binding assay.

23. The bispecific antigen-binding molecule of any one of claims 12-22, wherein the second antigen-binding domain specifically binds each of human PSMA with an K_{D} value of less than about 5 nM, less than about 2 nM, less than about 1 nM, less than about 800 pM, or less than about 600 pM, as measured in an in vitro surface plasmon resonance binding assay.

24. The bispecific antigen-binding molecule of any one of claims 12-23 that is a bispecific antibody or bispecific antigen-binding fragment thereof.

25. The bispecific antigen-binding molecule of any one of claims 12-24, wherein the second antigen-binding domain that specifically binds human PSMA comprises the heavy chain complementarity determining regions (HCDR1, HCDR2 and HCDR3) from a heavy chain variable region (HCVR) selected from the group consisting of SEQ ID NOs: 2, 10, 18, 26, 34, 42, 50, 58, 66, 74, 82, 90, 98, 106, 114, 122, and 138; and the light chain complementarity determining regions (LCDR1, LCDR2 and LCDR3) from a light chain variable region (LCVR) comprising an amino acid sequence selected from the group consisting of SEQ ID NOs: 162, 930 and 1642.

26. The bispecific antigen-binding molecule of any one of claims 12-24, wherein the second antigen-binding domain that specifically binds human PSMA comprises three heavy chain complementarity determining regions (A2-HCDR1, A2-HCDR2 and A2-HCDR3) and three light chain complementarity determining regions (A2-LCDR1, A2-LCDR2 and A2-LCDR3), wherein A2-HCDR1 comprises an amino acid sequence selected from the group consisting of SEQ ID NOs: 4, 12, 20, 28, 36, 44, 52, 60, 68, 76, 84, 92, 100, 108, 116, 124, and 140; A2-HCDR2 comprises an amino acid sequence selected from the group consisting of SEQ ID NOs: 6, 14, 22, 30, 38, 46, 54, 62, 70, 78, 86, 94, 102, 110, 118, 126, and 142; A2-HCDR3 comprises an amino acid sequence selected from the group consisting of SEQ ID NOs: 8, 16, 24, 32, 40, 48, 56, 64, 72, 80, 88, 96, 104, 112, 120, 128, and 144; A2-LCDR1 comprises an amino acid sequence selected from the group consisting of SEQ ID NOs: 164, 932 and 1644; A2-LCDR2 comprises an amino acid sequence selected from the group consisting of SEQ ID NOs: 166, 934 and 1646; and A2-LCDR3 comprises an amino acid sequence selected from the group consisting of SEQ ID NOs: 168, 936 and 1648.

27. The bispecific antigen-binding molecule of any one of claims 12-24, wherein the second antigen-binding domain that specifically binds human PSMA comprises the heavy and light chain CDRs of a HCVR/LCVR amino acid sequence pair selected from the group consisting of: SEQ ID NOs: 122/162, 122/930 and 66/1642.

28. The bispecific antigen-binding molecule of any one of claims 12-24, wherein the first antigen-binding domain that specifically binds human CD3 comprises heavy chain complementarity determining regions (HCDR1, HCDR2 and HCDR3) from a heavy chain variable region (HCVR) comprising an amino acid sequence as set forth in Table 12, Table 14, or Table 18 and light chain complementarity determining regions (LCDR1, LCDR2 and LCDR3) from a light chain variable region (LCVR) comprising an amino acid sequence as set forth in Table 12, Table 15, or Table 20.

29. The bispecific antigen-binding molecule of any one of claims 12-24, wherein the first antigen-binding domain that specifically binds human CD3 comprises heavy chain complementarity determining regions (HCDR1, HCDR2 and HCDR3) from a heavy chain variable region (HCVR) selected from the group consisting of SEQ ID NOs: 922, 154, 1482, 1490, 1498, 1506, 1514, 1522, 1530, 1538, 1546, 1554, 1562, 1570, 1578, 1586, 1594, 1602, 1610, 1618, 1626, and 1634, and light chain complementarity determining regions (LCDR1, LCDR2 and LCDR3) from a light chain variable region (LCVR) comprising an amino acid sequence selected from the group consisting of SEQ ID NOs: 162, 930 and 1642.

30. The bispecific antigen-binding molecule of any one of claims 12-24, wherein the first antigen-binding domain that specifically binds human CD3 comprises three heavy chain complementarity determining regions (A1-HCDR1, A1-HCDR2 and A1-HCDR3) and three light chain complementarity determining regions (A1-LCDR1, A1-LCDR2 and A1-LCDR3), wherein A1-HCDR1 comprises an amino acid sequence selected from the group consisting of SEQ ID NOs: 924, 156; 1484, 1492, 1500, 1508, 1516, 1524, 1532, 1540, 1548, 1556, 1564, 1572, 1580, 1588, 1596, 1604, 1612, 1620, 1628, and 1636; A1-HCDR2 comprises an amino acid sequence selected from the group consisting of SEQ ID NOs: 926, 158, 1486, 1494, 1502, 1510, 1518, 1526, 1534, 1542, 1550, 1558, 1566, 1574, 1582, 1590, 1598, 1606, 1614, 1622, 1630, and 1638; A1-HCDR3 comprises an amino acid sequence selected from the group consisting of SEQ ID NOs: 928, 160, 1488, 1496, 1504, 1512, 1520, 1528, 1536, 1544, 1552, 1560, 1568, 1576, 1584, 1592, 1600, 1608, 1616, 1624, 1632, and 1640; A1-LCDR1 comprises an amino acid sequence selected from the group consisting of SEQ ID NOs: 932, 164, and 1644; A1-LCDR2 comprises an amino acid sequence selected from the group consisting of SEQ ID NOs: 166, 934 and 1646; and A1-LCDR3 comprises an amino acid sequence selected from the group consisting of SEQ ID NOs: 168, 936 and 1648.

31. The bispecific antigen-binding molecule of any one of claims 12-24, wherein the first antigen-binding domain that specifically binds human CD3 comprises the heavy and light chain CDRs of a HCVR/LCVR amino acid sequence pair selected from the group consisting of: SEQ ID NOs: 922/930, 154/162, 1482/1642, 1490/1642, 1498/1642, 1506/1642, 1514/1642, 1522/1642, 1530/1642, 1538/1642, 1546/1642, 1554/1642, 1562/1642, 1570/1642, 1578/1642, 1586/1642, 1594/1642, 1602/1642, 1610/1642, 1618/1642, 1626/1642, and 1634/1642.

32. The bispecific antigen-binding molecule of any one of claims 12-24, wherein the first antigen-binding domain that specifically binds human CD3 comprises three heavy chain complementarity determining regions (A1-HCDR1, A1-HCDR2 and A1-HCDR3) and three light chain complementarity determining regions (A1-LCDR1, A1-LCDR2 and A1-LCDR3), and wherein the second antigen-binding domain that specifically binds human PSMA comprises three heavy chain complementarity determining regions (A2-HCDR1, A2-HCDR2 and A2-HCDR3) and three light chain complementarity determining regions (A2-LCDR1, A2-LCDR2 and A2-LCDR3);
wherein A1-HCDR1 comprises an amino acid sequence selected from the group consisting of SEQ ID NOs: 924, 156, 1484, 1492, 1500, 1508, 1516, 1524, 1532, 1540, 1548, 1556, 1564, 1572, 1580, 1588, 1596, 1604, 1612, 1620, 1628, and 1636; A1-HCDR2 comprises an amino acid sequence selected from the group consisting of SEQ ID NOs: 926, 158, 1486, 1494, 1502, 1510, 1518, 1526, 1534, 1542, 1550, 1558, 1566, 1574, 1582, 1590, 1598, 1606, 1614, 1622, 1630, and 1638; A1-HCDR3 comprises an amino acid sequence selected from the group consisting of SEQ ID NOs: 928, 160, 1488, 1496, 1504, 1512, 1520, 1528, 1536, 1544, 1552, 1560, 1568, 1576, 1584, 1592, 1600, 1608, 1616, 1624, 1632, and 1640; A1-LCDR1 comprises an amino acid sequence selected from the group consisting of SEQ ID NOs: 164, 932, and 1644; A1-LCDR2 comprises an amino acid sequence selected from the group consisting of SEQ ID NOs: 166, 934, and 1646; and A1-LCDR3 comprises an amino acid sequence selected from the group consisting of SEQ ID NOs: 168, 936, and 1648; and
wherein A2-HCDR1 comprises an amino acid sequence selected from the group consisting of SEQ ID NOs: 124 and 68; A2-HCDR2 comprises an amino acid sequence selected from the group consisting of SEQ ID NOs: 126 and 70; A2-HCDR3 comprises an amino acid sequence selected from the group consisting of SEQ ID NOs: 128 and 72; A2-LCDR1 comprises an amino acid sequence selected from the group consisting of SEQ ID NOs: 932, 164, and 1644; A2-LCDR2 comprises an amino acid sequence selected from the group consisting of SEQ ID NOs: 934, 166, and 1646; and A2-LCDR3 comprises an amino acid sequence selected from the group consisting of SEQ ID NOs: 936, 168, and 1648.

33. The bispecific antigen-binding molecule of any one of claims 12-24, wherein the first antigen-binding domain that specifically binds human CD3 comprises a heavy chain comprising variable domain framework regions having an amino acid sequence selected from FR1 (SEQ ID NO: 1655), FR2 (SEQ ID NO: 1656), FR3 (SEQ ID NO: 1657), and FR4 (SEQ ID NO: 1658).

34. The bispecific antigen-binding molecule of any one of claims 12-24, wherein the first antigen-binding domain that specifically binds human CD3 comprises a HCVR comprising HCDR1-HCDR2-HCDR3 having the amino acid sequences of SEQ ID NOs: 1659-1660-1661.

35. The bispecific antigen-binding molecule of any one of claims 12-24, wherein the second antigen-binding domain competes for binding to human PSMA with a reference antigen-binding protein comprising three heavy chain complementarity determining regions (A2-HCDR1, A2-HCDR2 and A2-HCDR3) and three light chain complementarity determining regions (A2-LCDR1, A2-LCDR2 and A2-LCDR3), wherein A2-HCDR1 comprises an amino acid sequence selected from the group consisting of SEQ ID NOs: 124 and 68; A2-HCDR2 comprises an amino acid sequence selected from the group consisting of SEQ ID NOs: 126 and 70; A2-HCDR3 comprises an amino acid sequence selected from the group consisting of SEQ ID NOs: 128 and 72; A2-LCDR1 comprises an amino acid sequence selected from the group consisting of SEQ ID NOS: 164, 932 and 1644; A2-LCDR2 comprises an amino acid sequence selected from the group consisting of SEQ ID NOs: 166, 934 and 1646; and A2-LCDR3 comprises an amino acid sequence selected from the group consisting of SEQ ID NOs: 168, 936, and 1648.

36. The bispecific antigen-binding molecule of any one of claims 12-24, wherein the second antigen-binding domain competes for binding to human PSMA with a reference antigen-binding protein comprising a heavy chain variable region (HCVR) comprising an amino acid sequence selected from the group consisting of SEQ ID NOs: 122 and 66, and a light chain variable region (LCVR) comprising an amino acid sequence selected from the group consisting of SEQ ID NOs: 162, 930 and 1642.

37. The bispecific antigen-binding molecule of any one of claims 12-24 wherein the first antigen-binding domain competes for binding to human CD3 with a reference antigen-binding protein comprising three heavy chain complementarity determining regions (A1-HCDR1, A1-HCDR2 and A1-HCDR3) and three light chain complementarity determining regions (A1-LCDR1, A1-LCDR2 and A1-LCDR3), wherein A1-HCDR1 comprises an amino acid sequence selected from the group consisting of SEQ ID NOs: 924, 156, 1484, 1492, 1500, 1508, 1516, 1524, 1532, 1540, 1548, 1556, 1564, 1572, 1580, 1588, 1596, 1604, 1612, 1620, 1628, and 1636; A1-HCDR2 comprises an amino acid sequence selected from the group consisting of SEQ ID NOs: 926, 158, 1486, 1494, 1502, 1510, 1518, 1526, 1534, 1542, 1550, 1558, 1566, 1574, 1582, 1590, 1598, 1606, 1614, 1622, 1630, and 1638; A1-HCDR3 comprises an amino acid sequence selected from the group consisting of SEQ ID NOs: 928, 160, 1488, 1496, 1504, 1512, 1520, 1528, 1536, 1544, 1552, 1560, 1568, 1576, 1584, 1592, 1600, 1608, 1616, 1624, 1632, and 1640; A1-LCDR1 comprises an amino acid sequence selected from the group consisting of SEQ ID NOs: 164, 932, and 1644; A1-LCDR2 comprises an amino acid sequence selected from the group consisting of SEQ ID NOs: 166, 934, and 1646; and A1-LCDR3 comprises an amino acid sequence selected from the group consisting of SEQ ID NOs: 168, 936, and 1648.

38. The bispecific antigen-binding molecule of any one of claims 12-24, wherein the first antigen-binding domain competes for binding to human CD3 with a reference antigen-binding protein comprising a heavy chain variable region (HCVR) comprising an amino acid sequence selected from the group consisting of SEQ ID NOs: 922, 154, 1482, 1490, 1498, 1506, 1514, 1522, 1530, 1538, 1546, 1554, 1562, 1570, 1578, 1586, 1594, 1602, 1610, 1618, 1626, and 1634, and a light chain variable region (LCVR) comprising an amino acid sequence selected from the group consisting of SEQ ID NOs: 930, 162, and 1642.

39. The bispecific antigen-binding molecule of any one of claims 12-24, wherein the first antigen-binding domain competes for binding to human CD3 with a reference antigen-binding protein comprising a heavy chain variable region (HCVR) comprising an amino acid sequence selected from the group consisting of SEQ ID NOs: 922, 154, 1482, 1490, 1498, 1506, 1514, 1522, 1530, 1538, 1546, 1554, 1562, 1570, 1578, 1586, 1594, 1602, 1610, 1618, 1626, and 1634, and a light chain variable region (LCVR) comprising an amino acid sequence selected from the group consisting of SEQ ID NOs: 930, 162, and 1642; and wherein the second antigen-binding domain competes for binding to human PSMA with a reference antigen-binding protein comprising a heavy chain variable region (HCVR) comprising an amino acid sequence selected from the group consisting of SEQ ID NOs: 122 and 66, and a light chain variable region (LCVR) comprising an amino acid sequence selected from the group consisting of SEQ ID NOs: 930, 162, and 1642.

40. A pharmaceutical composition comprising the antibody or antigen-binding fragment thereof of any one of claims 1-11 or the bispecific antigen-binding molecule of any one of claims 12-39 and a pharmaceutically acceptable carrier or diluent.

41. A method for treating a cancer in a subject, the method comprising administering to the subject the pharmaceutical composition of claim 40.

42. The method of claim 41, wherein the cancer is selected from the group consisting of prostate cancer, kidney cancer, bladder cancer, colorectal cancer, and gastric cancer.

43. The method of claim 42, wherein the cancer is prostate cancer.

44. The method of claim 43, wherein the prostate cancer is castrate-resistant prostate cancer.
